(19) United States
(12) Patent Application Publication
(10) Pub. No.: US 2024/0247062 A1
(43) Pub. Date: Jul. 25, 2024

(54) HETERODIMERIC ANTIBODIES THAT BIND CLAUDIN18.2 AND CD3

(71) Applicant: Xencor, Inc., Pasadena, CA (US)

(72) Inventors: Matthew J. Bernett, Monrovia, CA (US); Gregory Moore, Azusa, CA (US); Alex Nisthal, Monrovia, CA (US)

(21) Appl. No.: 18/564,994

(22) PCT Filed: Jun. 15, 2022
(86) PCT No.: PCT/US22/33625

§ 371 Date: Nov. 28, 2023

Related U.S. Application Data
(60) Provisional application No. 63/210,787, filed on Jun. 15, 2021.

(51) Int. Cl. C07K 16/28

(52) U.S. Cl. CPC C07K 16/2809; C07K 16/28; C07K 2317/24; C07K 2317/31; C07K 2317/622

(57) ABSTRACT

The present invention is directed to antibodies, including novel antigen binding domains and heterodimeric antibodies, that bind Claudin18.2 (CLDN18.2).

### PRIORITY

[0001] This application claims priority to U.S. Provisional Patent Application No. 63/210,787, filed Jun. 15, 2021, which is incorporated herein by reference in its entirety for all purposes.

### SEQUENCE LISTING

[0002] The instant application contains a sequence listing which has been submitted electronically in ASCII format and is hereby incorporated by reference in its entirety. Said ASCII copy, created on Jun. 13, 2022, is named 067461-5232-WO_SL.txt and is 1,371,138 bytes in size.

### BACKGROUND OF THE INVENTION

[0003] Antibody-based therapeutics are used successfully to treat a variety of diseases, including cancer. An increasingly prevalent avenue being explored is the engineering of single immunoglobulin molecules that co-engage two different antigens. Such alternate antibody formats that engage two different antigens are often referred to as bispecific antibodies. Because the considerable diversity of the antibody variable region (Fv) makes it possible to produce an Fv that recognizes virtually any molecule, the typical approach to bispecific antibody generation is the introduction of new variable regions into the antibody.

[0004] A particularly useful approach for bispecific antibodies is to engineer a first binding domain which engages CD3 and a second binding domain which engages an antigen associated with or upregulated on cancer cells so that the bispecific antibody redirects CD3+ T cells to destroy the cancer cells.

[0005] Claudins are a family of integral tight junction membrane proteins. Claudin 18 (or CLDN18) is one such protein in the claudin family. Claudin 18 may be expressed as two different splice variants. The claudin 18 isoform A2 splice variant (or CLDN18.2) is expressed on gastric cells, and in particular the cells of stomach epithelium. Notably, it has also been previously reported that CLDN18.2 is highly expressed in several cancers including gastric, esophageal, and pancreatic cancers. In view of this, anti-CLDN18.2 antibodies are useful, for example, for localizing anti-tumor therapeutics (e.g., chemotherapeutic agents and T cells) to such CLDN18.2 expressing tumors.

[0006] The present invention provides novel bispecific antibodies to CD3 and CLDN18.2 that are capable of localizing CD3+ effector T cells to CLDN18.2 expressing tumors.

### BRIEF SUMMARY OF THE INVENTION

[0007] Accordingly, provided herein are Claudin18.2 (CLDN18.2) antigen binding domains and anti-CLDN18.2 antibodies (e.g., bispecific antibodies).

[0008] In one aspect, provided herein is a heterodimeric antibody that includes a first monomer, a second monomer and a common light chain. The first monomer comprises, from N- to C-terminal, VH-CH1-domain linker-scFv-domain linker-CH2-CH3, wherein said CH2-CH3 is a first variant Fc domain. The second monomer comprises, from N- to C-terminal, VH-CH1-hinge-CH2-CH3, wherein said CH2-CH3 is a second variant Fc domain. The common light chain comprises VL-CL. In such antibodies, one of said variant Fc domains comprises amino acid substitutions N208D/Q295E/N384D/Q418E/N421D, one of first and second variant Fc domains each comprise amino acid substitutions E233P/L234V/L235A/G236del/S267K, and one of said variant Fc domains comprises amino acid substitutions S364K/E357Q and the other variant Fc domain comprises amino acid substitutions L368D/K370S, wherein numbering is according to the EU index as in Kabat. The VH domain comprises SEQ ID NO:81 or SEQ ID NO:82 and said VL domain comprises SEQ ID NO:84. In some embodiments, the scFv has a sequence selected from the group consisting of SEQ ID NO:87, SEQ ID NO:88, SEQ ID NO:98, SEQ ID NO:99, SEQ ID NO:109, SEQ ID NO:110, SEQ ID NO:120, SEQ ID NO:121, SEQ ID NO:131, SEQ ID NO:132, SEQ ID NO:142, SEQ ID NO:143.

[0009] In some embodiments, the antibody is selected from the group consisting of XENP24647, XENP31729, XENP24649, XENP31723, XENP31725, XENP31727, XENP29476, XENP29478, XENP31724, XENP31726, XENP31728, XENP29477, XENP29479, XENC10101, XENC10102, XENC10103, XENC10104, XENC10105, XENC10106, XENC10107, XENC10108, XENC10109, XENC10110, XENC10111, XENC10112, XENC10113, XENC10114, XENC10115, XENC10116, XENC10117, XENC10118, XENC10119, XENC10120, XENC10121, XENC10122, XENC10123, XENC10124, XENC10125, XENC10126, XENC10127, XENC10128, XENC10129, XENC10130, XENC10131, XENC10132, XENC10133, XENC10134, XENC10135, XENC10136, XENC10137, XENC10138, XENC10139, XENC10140, XENC10141, XENC10142, XENC10143, XENC10144, XENC10145, XENC10146, XENC10147, XENC10148, XENC10149, XENC10150, XENC10151, XENC10152, XENC10153, XENC10154, XENC10155 and XENC10156.

[0010] In another aspect, provide herein is a composition comprising an anti-CLDN18.2 antigen binding domain (ABD), wherein said ABD comprises: a) a variable heavy domain comprising SEQ ID NO:81; and b) a variable light domain comprising SEQ ID NO:84.

[0011] In another aspect, provide herein is a composition comprising an anti-CLDN18.2 antigen binding domain (ABD), wherein said ABD comprises: a) a variable heavy domain comprising SEQ ID NO:82; and b) a variable light domain comprising SEQ ID NO:84.

[0012] In one aspect, provided herein is a heterodimeric antibody that includes a first monomer, a second monomer, and a third monomer. The first monomer includes, from N- to C-terminal, scFv-domain linker-CH2-CH3, wherein said CH2-CH3 is a first variant Fc domain. The second monomer includes, from N- to C-terminal, VH-CH1-hinge-CH2-CH3, wherein said CH2-CH3 is a second variant Fc domain. The third monomer includes VL-CL. In such antibodies, one of said variant Fc domains comprises amino acid substitutions N208D/Q295E/N384D/Q418E/N421D, one of said first and second variant Fc domains each comprise amino acid substitutions E233P/L234V/L235A/G236del/S267K, and one of said variant Fc domains comprises amino acid substitutions S364K/E357Q and the other variant Fc domain comprises amino acid substitutions L368D/K370S, wherein numbering is according to the EU index as in Kabat. In some embodiments, the scFv has a sequence selected from the group consisting of SEQ ID NO:87, SEQ ID NO:88, SEQ ID NO:98, SEQ ID NO:99, SEQ ID NO:109, SEQ ID NO:110, SEQ ID NO:120, SEQ ID NO:121, SEQ ID NO:131, SEQ ID NO:132, SEQ ID NO:142, SEQ ID NO:143. In some embodiments, said variable heavy (VH) domain comprises SEQ ID NO:81 or SEQ ID NO:82 and said variable light (VI) domain comprises SEQ ID NO:84.

[0013] In some embodiments, the CH1-hinge-CH2-CH3 component of the second heavy chain comprises SEQ ID NO:32, said first variant Fc domain comprises SEQ ID NO:33 and said constant light domain comprises SEQ ID NO:74. In some embodiments, the antibody is selected from the group consisting of XENP29472, XENP29473, XENP29474 and XENP29475.

[0014] In another aspect, provided herein is a heterodimeric antibody comprising a first monomer, a second monomer and a common light chain. The first monomer comprises, from N- to C-terminal, VH1-CH1-hinge-CH2-CH3-domain linker-VH2, wherein said CH2-CH3 is a first variant Fc domain. The second monomer comprises, from N- to C-terminal, VH1-CH1-hinge-CH2-CH3-domain linker-VL2, wherein said CH2-CH3 is a second variant Fc domain. The common light chain comprises a VL1-CL. In such antibodies, one of said variant Fc domains comprises amino acid substitutions N208D/Q295E/N384D/Q418E/N421D, said first and second variant Fc domains each comprise amino acid substitutions E233P/L234V/L235A/G236del/S267K; and one of said variant Fc domains comprises amino acid substitutions S364K/E357Q and the other Fc domain comprises amino acid substitutions L368D/K370S, wherein numbering is according to the EU index as in Kabat. VH2 and VL2 are selected from the pairs consisting of SEQ ID NO:89 and SEQ ID NO:93, SEQ ID NO:100 and SEQ ID NO:104, SEQ ID NO:111 and SEQ ID NO:115, SEQ ID NO:122 and SEQ ID NO:126, SEQ ID NO: 133 and SEQ ID NO:137, SEQ ID NO:144 and SEQ ID NO:148. Further, the VH1 domain comprises SEQ ID NO:81 or SEQ ID NO:82 and said VL1 domain comprises SEQ ID NO:84.

[0015] In another aspect, provided herein is a heterodimeric antibody comprising a first monomer, a second monomer and a common light chain. The first monomer comprises, from N- to C-terminal, VH1-CH1-hinge-CH2-CH3-domain linker-scFv, wherein said CH2-CH3 is a first variant Fc domain. The second monomer comprises, from N- to C-terminal, VH1-CH1-hinge-CH2-CH3, wherein said CH2-CH3 is a second variant Fc domain. The common light chain comprises a VL1-CL. In such antibodies, one of said variant Fc domains comprises amino acid substitutions N208D/Q295E/N384D/Q418E/N421D, said first and second variant Fc domains each comprise amino acid substitutions E233P/L234V/L235A/G236del/S267K; and one of said variant Fc domains comprises amino acid substitutions S364K/E357Q and the other Fc domain comprises amino acid substitutions L368D/K370S, wherein numbering is according to the EU index as in Kabat. The scFv has a sequence selected from the group consisting of SEQ ID NO:87, SEQ ID NO:88, SEQ ID NO:98, SEQ ID NO:99, SEQ ID NO:109, SEQ ID NO:110, SEQ ID NO:120, SEQ ID NO:121, SEQ ID NO:131, SEQ ID NO:132, SEQ ID NO:142, SEQ ID NO:143. Further, said VH1 domain comprises SEQ ID NO:81 or SEQ ID NO:82 and said VL1 domain comprises SEQ ID NO:84.

[0016] In one aspect, provided herein is a heterodimeric antibody comprising a first monomer, a second monomer and a common light chain. The first monomer comprises, from N- to C-terminal, VH1-CH1-domain linker-VH2-domain linker-CH2-CH3, wherein said CH2-CH3 is a first variant Fc domain. The second monomer comprising, from N- to C-terminal, VH1-CH1-domain linker-VL2-domain linker-CH2-CH3, wherein said CH2-CH3 is a second variant Fc domain. The common light chain comprising a VL1-CL. In such antibodies, one of said variant Fc domains comprises amino acid substitutions N208D/Q295E/N384D/Q418E/N421D, said first and second variant Fc domains each comprise amino acid substitutions E233P/L234V/L235A/G236del/S267K; and one of said variant Fc domains comprises amino acid substitutions S364K/E357Q and the other Fc domain comprises amino acid substitutions L368D/K370S, wherein numbering is according to the EU index as in Kabat. The VH2 and VL2 are selected from the pairs consisting of SEQ ID NO:89 and SEQ ID NO:93, SEQ ID NO:100 and SEQ ID NO:104, SEQ ID NO:111 and SEQ ID NO:115, SEQ ID NO:122 and SEQ ID NO:126, SEQ ID NO: 133 and SEQ ID NO:137, SEQ ID NO:144 and SEQ ID NO:148. Further, said VH1 domain comprises SEQ ID NO:81 or SEQ ID NO:82 and said VL1 domain comprises SEQ ID NO:84

[0017] In another aspect, provided herein is a heterodimeric antibody comprising a first monomer, a second monomer and a light chain. The first monomer comprises, from N- to C-terminal, VH-CH1-domain linker-scFv-domain linker-CH2-CH3, wherein said CH2-CH3 is a first variant Fc domain. The second monomer comprises a second variant Fc domain comprising CH2-CH3. The light chain comprises VL-CL. In such antibodies, one of said variant Fc domains comprises amino acid substitutions N208D/Q295E/N384D/Q418E/N421D, said first and second variant Fc domains each comprise amino acid substitutions E233P/L234V/L235A/G236del/S267K, and one of said variant Fc domains comprises amino acid substitutions S364K/E357Q and the other variant Fc domain comprises amino acid substitutions L368D/K370S, wherein numbering is according to the EU index as in Kabat. The scFv has a sequence selected from the group consisting of SEQ ID NO:87, SEQ ID NO:88, SEQ ID NO:98, SEQ ID NO:99, SEQ ID NO:109, SEQ ID NO:110, SEQ ID NO:120, SEQ ID NO:121, SEQ ID NO:131, SEQ ID NO:132, SEQ ID NO:142, SEQ ID NO:143. Further, said VH domain comprises SEQ ID NO:81 or SEQ ID NO:82 and said VL domain comprises SEQ ID NO:84

[0018] In one aspect, provided herein is a heterodimeric antibody comprising a first monomer, a second monomer and a light chain. The first monomer comprises, from N- to C-terminal, scFv-domain linker-VH-CH1-hinge-CH2-CH3, wherein said CH2-CH3 is a first variant Fc domain. The second monomer comprises a second variant Fc domain comprising CH2-CH3. The light chain comprises VL-CL. In such antibodies, one of said variant Fc domains comprises amino acid substitutions N208D/Q295E/N384D/Q418E/N421D, said first and second variant Fc domains each comprise amino acid substitutions E233P/L234V/L235A/G236del/S267K, and one of said variant Fc domains comprises amino acid substitutions S364K/E357Q and the other variant Fc domain comprises amino acid substitutions L368D/K370S, wherein numbering is according to the EU index as in Kabat. The scFv has a sequence selected from the group consisting of SEQ ID NO:87, SEQ ID NO:88, SEQ ID NO:98, SEQ ID NO:99, SEQ ID NO:109, SEQ ID NO:110, SEQ ID NO:120, SEQ ID NO:121, SEQ ID NO:131, SEQ ID NO:132, SEQ ID NO:142, SEQ ID NO:143. Further, said VH domain comprises SEQ ID NO:81 or SEQ ID NO:82 and said VL domain comprises SEQ ID NO:84

[0019] In another aspect, provided herein is a heterodimeric antibody comprising a first monomer, a second monomer and a common light chain. The first monomer comprises, from N- to C-terminal, scFv-domain linker-VH-CH1-hinge-CH2-CH3, wherein said CH2-CH3 is a first variant Fc domain. The second monomer comprises, from N- to C-terminal, VH-CH1-hinge-CH2-CH3, wherein said CH2-CH3 is a second variant Fc domain. The common light chain comprises VL-CL. In such antibodies, one of said variant Fc domains comprises amino acid substitutions N208D/Q295E/N384D/Q418E/N421D, said first and second variant Fc domains each comprise amino acid substitutions E233P/L234V/L235A/G236del/S267K, and one of said variant Fc domains comprises amino acid substitutions S364K/E357Q and the other variant Fc domain comprises amino acid substitutions L368D/K370S, wherein numbering is according to the EU index as in Kabat. The scFv has a sequence selected from the group consisting of SEQ ID NO:87, SEQ ID NO:88, SEQ ID NO:98, SEQ ID NO:99, SEQ ID NO:109, SEQ ID NO:110, SEQ ID NO:120, SEQ ID NO:121, SEQ ID NO:131, SEQ ID NO:132, SEQ ID NO:142, SEQ ID NO:143. Further, said VH domain comprises SEQ ID NO:81 or SEQ ID NO:82 and said VL domain comprises SEQ ID NO:84

[0020] In another aspect, provided herein is a nucleic acid composition that includes nucleic acids encoding any of the heterodimeric antibodies or antigen binding domains described herein.

[0021] In yet another aspect, provided herein is an expression vector that includes any of the nucleic acids described herein.

[0022] In one aspect, provided herein is a host cell transformed with any of the expression vectors or nucleic acids described herein.

[0023] In another aspect, provided herein is a method of making a subject heterodimeric antibody or antigen binding domain described herein. The method includes a step of culturing a host cell transformed with any of the expression vectors or nucleic acids described herein under conditions wherein the antibody or antigen binding domain is expressed, and recovering the antibody or antigen binding domain.

[0024] In one aspect, provided herein is a method of treating cancer that includes administering to a patient in need thereof any one of the subject antibodies described herein. In some embodiments, the cancer is a gastric cancer.

### BRIEF DESCRIPTION OF THE DRAWINGS

[0025] FIG. 1A-1E depict useful pairs of Fc heterodimerization variant sets (including skew and pI variants). There are variants for which there are no corresponding “monomer 2” variants; these are pI variants which can be used alone on either monomer.

[0026] FIG. 2 depicts a list of isosteric variant antibody constant regions and their respective substitutions. pI_(−) indicates lower pI variants, while pI_(+) indicates higher pI variants. These can be optionally and independently combined with other heterodimerization variants of the inventions (and other variant types as well, as outlined herein.)

[0027] FIG. 3 depicts useful ablation variants that ablate FcγR binding (sometimes referred to as “knock outs” or “KO” variants). Generally, ablation variants are found on both monomers, although in some cases they may be on only one monomer.

[0028] FIG. 4 depicts particularly useful embodiments of “non-Fv” components of the invention.

[0029] FIG. 5 depict a number of charged scFv linkers that find use in increasing or decreasing the pI of heterodimeric antibodies that utilize one or more scFv as a component. The (+H) positive linker finds particular use herein. A single prior art scFv linker with single charge is referenced as “Whitlow”, from Whitlow et al., Protein Engineering 6(8):989-995 (1993). It should be noted that this linker was used for reducing aggregation and enhancing proteolytic stability in scFvs. It should also be noted that any or all of these linkers can be used as optional domain linkers as discussed herein, and in particular, those listed as “Additional scFv linkers” that are uncharged may find particular use.

[0030] FIG. 6A-6D depicts the sequences of several useful 1+1 Fab-scFv-Fc bispecific antibody format heavy chain backbones based on human IgG1, without the Fv sequences (e.g. the scFv and the VH for the Fab side). That is, the “/” slash at the beginning of the “Fab-Fc side” indicates that the C-terminus of a VH as outlined herein is attached at that point. Similarly, “/” slash at the beginning of the “scFv-Fc side” indicates that the C-terminus of a scFv (e.g. VH-scFv linker-VL or VL-scFv linker-VH) as outlined herein is attached at that point. Backbone 1 is based on human IgG1 (356E/358M allotype), and includes the S364K/E357Q:L368D/K370S skew variants, C220S on the chain with the S364K/E357Q skew variants, the N208D/Q295E/N384D/Q418E/N421D pI variants on the chain with L368D/K370S skew variants and the E233P/L234V/L235A/G236del/S267K ablation variants on both chains. Backbone 2 is based on human IgG1 (356E/358M allotype), and includes S364K:L368D/K370S skew variants, C220S on the chain with the S364K skew variant, the N208D/Q295E/N384D/Q418E/N421D pI variants on the chain with L368D/K370S skew variants, and the E233P/L234V/L235A/G236del/S267K ablation variants on both chains. Backbone 3 is based on human IgG1 (356E/358M allotype), and includes S364K:L368E/K370S skew variants, C220S on the chain with the S364K skew variant, the N208D/Q295E/N384D/Q418E/N421D pI variants on the chain with L368E/K370S skew variants and the E233P/L234V/L235A/G236del/S267K ablation variants on both chains. Backbone 4 is based on human IgG1 (356E/358M allotype), and includes D401K:K360E/Q362E/T411E skew variants, C220S on the chain with the D401K skew variant, the N208D/Q295E/N384D/Q418E/N421D pI variants on the chain with K360E/Q362E/T411E skew variants and the E233P/L234V/L235A/G236del/S267K ablation variants on both chains. Backbone 5 is based on human IgG1 (356D/358L allotype), and includes S364K/E357Q:L368D/K370S skew variants, C220S on the chain with the S364K/E357Q skew variants, the N208D/Q295E/N384D/Q418E/N421D pI variants on the chain with L368D/K370S skew variants and the E233P/L234V/L235A/G236del/S267K ablation variants on both chains. Backbone 6 is based on human IgG1 (356E/358M allotype), and includes S364K/E357Q:L368D/K370S skew variants, C220S on the chain with the S364K/E357Q skew variants, N208D/Q295E/N384D/Q418E/N421D pI variants on the chain with L368D/K370S skew variants and the E233P/L234V/L235A/G236del/S267K ablation variants on both chains, as well as an N297A variant on both chains. Backbone 7 is identical to 6 except the mutation is N297S. Backbone 8 is based on human IgG4, and includes the S364K/E357Q:L368D/K370S skew variants, the N208D/Q295E/N384D/Q418E/N421D pI variants on the chain with L368D/K370S skew variants, as well as a S228P (EU numbering, this is S241P in Kabat) variant on both chains that ablates Fab arm exchange as is known in the art. Backbone 9 is based on human IgG2, and includes the S364K/E357Q:L368D/K370S skew variants, the N208D/Q295E/N384D/Q418E/N421D pI variants on the chain with L368D/K370S skew variants. Backbone 10 is based on human IgG2, and includes the S364K/E357Q:L368D/K370S skew variants, the N208D/Q295E/N384D/Q418E/N421D pI variants on the chain with L368D/K370S skew variants as well as a S267K variant on both chains. Backbone 11 is identical to backbone 1, except it includes M428L/N434S Xtend mutations. Backbone 12 is based on human IgG1 (356E/358M allotype), and includes S364K/E357Q:L368D/K370S skew variants, C220S and the P217R/P229R/N276K pI variants on the chain with S364K/E357Q skew variants and the E233P/L234V/L235A/G236del/S267K ablation variants on both chains. Included within each of these backbones are sequences that are 90, 95, 98 and 99% identical (as defined herein) to the recited sequences, and/or contain from 1, 2, 3, 4, 5, 6, 7, 8, 9 or 10 additional amino acid substitutions (as compared to the “parent” of the Figure, which, as will be appreciated by those in the art, already contain a number of amino acid modifications as compared to the parental human IgG1 (or IgG2 or IgG4, depending on the backbone). That is, the recited backbones may contain additional amino acid modifications (generally amino acid substitutions) in addition to the skew, pI and ablation variants contained within the backbones of this figure.

[0031] FIG. 7A-7C depicts the sequences of several useful 2+1 Fab₂-scFv-Fc bispecific antibody format heavy chain backbones based on human IgG1, without the sequences of the Fvs and linkers. Thus, for example, on the “Fab-Fc side”, the (VH domain/” indicates that the C-terminus of a VH domain is attached at that location, which is the beginning of the CH1 domain of a heavy chain. Similarly, the “VH-CH1-domain linker1-scFv-domain linker2/” at the beginning of the “Fab-scFv-Fc side” indicates that these sequences are attached to the recited sequence, which is the variant CH2-CH3 Fc domain. As discussed herein, the scFv domain can be in either orientation, -VH-scFv linker-VL- or -VL-scFv linker-VH- as discussed herein. Additionally, preferred domain linkers for “domain linker2” are those recited in FIG. 5 as “useful domain linkers”. Note that the sequence identifiers are only to the recited sequences. Backbone 1 is based on human IgG1 (356E/358M allotype), and includes the S364K/E357Q:L368D/K370S skew variants, the N208D/Q295E/N384D/Q418E/N421D pI variants on the chain with L368D/K370S skew variants and the E233P/L234V/L235A/G236del/S267K ablation variants on both chains. Backbone 2 is based on human IgG1 (356E/358M allotype), and includes S364K:L368D/K370S skew variants, the N208D/Q295E/N384D/Q418E/N421D pI variants on the chain with L368D/K370S skew variants, and the E233P/L234V/L235A/G236del/S267K ablation variants on both chains. Backbone 3 is based on human IgG1 (356E/358M allotype), and includes S364K:L368E/K370S skew variants, the N208D/Q295E/N384D/Q418E/N421D pI variants on the chain with L368E/K370S skew variants and the E233P/L234V/L235A/G236del/S267K ablation variants on both chains. Backbone 4 is based on human IgG1 (356E/358M allotype), and includes D401K:K360E/Q362E/T411E skew variants, the N208D/Q295E/N384D/Q418E/N421D pI variants on the chain with K360E/Q362E/T411E skew variants and the E233P/L234V/L235A/G236del/S267K ablation variants on both chains. Backbone 5 is based on human IgG1 (356D/358L allotype), and includes S364K/E357Q:L368D/K370S skew variants, the N208D/Q295E/N384D/Q418E/N421D pI variants on the chain with L368D/K370S skew variants and the E233P/L234V/L235A/G236del/S267K ablation variants on both chains. Backbone 6 is based on human IgG1 (356E/358M allotype), and includes S364K/E357Q:L368D/K370S skew variants, N208D/Q295E/N384D/Q418E/N421D pI variants on the chain with L368D/K370S skew variants and the E233P/L234V/L235A/G236del/S267K ablation variants on both chains, as well as an N297A variant on both chains. Backbone 7 is identical to 6 except the mutation is N297S. Backbone 8 is identical to backbone 1, except it includes M428L/N434S Xtend mutations. Backbone 9 is based on human IgG1 (356E/358M allotype), and includes S364K/E357Q:L368D/K370S skew variants, the P217R/P229R/N276K pI variants on the chain with S364K/E357Q skew variants and the E233P/L234V/L235A/G236del/S267K ablation variants on both chains. Included within each of these backbones are sequences that are 90, 95, 98 and 99% identical (as defined herein) to the recited sequences, and/or contain from 1, 2, 3, 4, 5, 6, 7, 8, 9 or 10 additional amino acid substitutions (as compared to the “parent” of the Figure, which, as will be appreciated by those in the art, already contain a number of amino acid modifications as compared to the parental human IgG1 (or IgG2 or IgG4, depending on the backbone). That is, the recited backbones may contain additional amino acid modifications (generally amino acid substitutions) in addition to the skew, pI and ablation variants contained within the backbones of this figure.

[0032] FIG. 8 depicts the “non-Fv” backbone of cognate light chains (i.e. constant light chain) which find use in the 1+1 Fab-scFv-Fc and 2+1 Fab₂-scFv-Fc bispecific antibodies of the invention.

[0033] FIG. 9 depicts the sequences for A) human claudin 18 isoform A2 (CLDN18.2), B) mouse claudin 18 isoform A2.1, C) mouse claudin 18 isoform A2.2, and D) cynomolgus claudin 18, to facilitate the development of antigen binding domains that are cross-reactive for ease of clinical development.

[0034] FIG. 10 depicts the variable heavy and variable light chains for illustrative anti-CLDN18.2 ABDs which find use in the anti-CLDN18.2x anti-CD3 bispecific antibodies of the invention. The CDRs are underlined. As noted herein and is true for every sequence herein containing CDRs, the exact identification of the CDR locations may be slightly different depending on the numbering used as is shown in Table 1, and thus included herein are not only the CDRs that are underlined but also CDRs included within the V_{H} and V_{L} domains using other numbering systems. H0 Variable Heavy and L0 Variable Light are murine; and H1 Variable Heavy, H2 Variable Heavy, and L1 Variable Light are humanized.

[0035] FIG. 11 depicts sequences for a murine anti-CLDN18.2 antibody with an ablation variant (E233P/L234V/L235A/G236del/S267K, “IgG1_PVA_/S267K”). The CDRs are underlined. As noted herein and is true for every sequence herein containing CDRs, the exact identification of the CDR locations may be slightly different depending on the numbering used as is shown in Table 1, and thus included herein are not only the CDRs that are underlined but also CDRs included within the V_{H} and V_{L} domains using other numbering systems.

[0036] FIG. 12A-12F depicts sequences for exemplary anti-CD3 scFvs suitable for use in the bispecific antibodies of the invention. The CDRs are underlined, the scFv linker is double underlined (in the sequences, the scFv linker is a positively charged scFv (GKPGS)₄ linker (SEQ ID NO: 10), although as will be appreciated by those in the art, this linker can be replaced by other linkers, including uncharged or negatively charged linkers, some of which are depicted in FIG. 5), and the slashes indicate the border(s) of the variable domains. In addition, the naming convention illustrates the orientation of the scFv from N- to C-terminus. The scFv sequences are shown in both orientations as indicated. As noted herein and is true for every sequence herein containing CDRs, the exact identification of the CDR locations may be slightly different depending on the numbering used as is shown in Table 1, and thus included herein are not only the CDRs that are underlined but also CDRs included within the V_{H} and V_{L} domains using other numbering systems. Furthermore, as for all the sequences in the Figures, these V_{H} and V_{L} sequences can be used either in a scFv format or in a Fab format.

[0037] FIG. 13A-13B depicts a couple of useful formats of the present invention. FIG. 13A depicts the “1+1 Fab-scFv-Fc” format, with a first Fab arm binding CLDN18.2 and a second scFv arm binding CD3. FIG. 13B depicts the “2+1 Fab₂-scFv-Fc” format, with a first Fab arm binding CLDN18.2 and a second Fab-scFv arm, wherein the Fab binds CLDN18.2 and the scFv binds CD3. It should be noted that additional formats can be used as well, as generally depicted in FIG. 42, herein.

[0038] FIG. 14 depicts the amino acid sequences of prototype anti-CLDN18.2x anti-CD3 bispecific antibodies (based on murine CLDN18.2 ABD as depicted in FIG. 10) in the 1+1 Fab-scFv-Fc format. The antibodies are named using the Fab variable region first and the scFv variable region second, separated by a dash. CDRs are underlined and slashes indicate the border(s) of the variable regions. The scFv domain has orientation (N- to C-terminus) of V_{H}-ScFv linker-V_{L}, although this can be reversed. In addition, each sequence outlined herein can include or exclude the M428L/N434S variants in one or preferably both Fc domains, which results in longer half-life in serum.

[0039] FIG. 15A-15AQ depicts the amino acid sequences of prototype anti-CLDN18.2 x anti-CD3 bispecific antibodies (based on murine CLDN18.2 ABD as depicted in FIG. 10) in the 2+1 Fab₂-scFv-Fc format. The antibodies are named using the Fab variable region first and the Fab-scFv variable regions second, separated by a dash. CDRs are underlined and slashes indicate the border(s) of the variable regions. The scFv domain has orientation (N- to C-terminus) of V_{H}-ScFv linker-V_{L}, although this can be reversed. In addition, each sequence outlined herein can include or exclude the M428L/N434S variants in one or preferably both Fc domains, which results in longer half-life in serum.

[0040] FIG. 16 depicts the amino acid sequences of a control anti-RSV x anti-CD3 bispecific antibodies in the 1+1 Fab-scFv-Fc format. The antibody is named using the Fab variable region first and the scFv variable region second, separated by a dash. CDRs are underlined and slashes indicate the border(s) of the variable regions. The scFv domain has orientation (N- to C-terminus) of V_{H}-ScFv linker-V_{L}, although this can be reversed. In addition, each sequence outlined herein can include or exclude the M428L/N434S variants in one or preferably both Fc domains, which results in longer half-life in serum.

[0041] FIG. 17A-17B depicts binding of prototype anti-CLDN18.2 x anti-CD3 bispecific antibodies having murine CLDN18.2 ABD XENP24645 (1+1 Fab-scFv-Fc with CD3-High), XENP24646 (1+1 Fab-scFv-Fc with CD3-High-Int #1), XENP24647 (2+1 Fab₂-scFv-Fc with CD3-High), XENP24648 (2+1 Fab₂-scFv-Fc with CD3-High Int #1), and XENP24649 (2+1 Fab₂-scFv-Fc with CD3-Intermediate) to A) KP-4 cells and B) NUGC-4 cells. Controls included an anti-RSV x anti-CD3 bispecific antibody, cells only, and secondary antibody only. The data show that the prototype anti-CLDN18.2 x anti-CD3 bsAbs dose-dependently bound to NUGC-4 cells, with close to baseline binding to KP-4 cells at all concentrations tested. Notably, bsAbs of the “2+1 Fab₂-scFv-Fc” format (i.e. XENP24647, XENP24648, and XENP24949) bound much more potently to NUGC-4 cells than did bsAbs of the “1+1 Fab-scFv-Fc” format (i.e. XENP24645 and XENP24646) due to the extra avidity conveyed by the “2+1 Fab₂-scFv-Fc” format.

[0042] FIG. 18A-18B depicts induction of RTCC on A) KP-4 cells and B) NUGC-4 cells by prototype anti-CLDN18.2 x anti-CD3 bispecific antibodies having murine CLDN18.2 ABD XENP24645 (1+1 Fab-scFv-Fc with CD3-High), XENP24646 (1+1 Fab-scFv-Fc with CD3-High-Int #1), XENP24647 (2+1 Fab₂-scFv-Fc with CD3-High), XENP24648 (2+1 Fab₂-scFv-Fc with CD3-High Int #1), and XENP24649 (2+1 Fab₂-scFv-Fc with CD3-Intermediate). The data show that the prototype anti-CLDN18.2 x anti-CD3 bsAbs dose-dependently induced RTCC on NUGC-4, and no RTCC on KP-4 cells.

[0043] FIG. 19A-19B depicts the expression levels on A) NUGC-4 cells and B) SNU-601 cells as determined by flow cytometry. The data indicate that SNU-601 expresses more CLDN18.2 than does NUGC-4.

[0044] FIG. 20A-20B depicts binding of prototype anti-CLDN18.2 x anti-CD3 bispecific antibodies having murine CLDN18.2 ABD XENP24645 (1+1 Fab-scFv-Fc with CD3-High), XENP24646 (1+1 Fab-scFv-Fc with CD3-High-Int #1), XENP24647 (2+1 Fab₂-scFv-Fc with CD3-High), and XENP24649 (2+1 Fab₂-scFv-Fc with CD3-Intermediate) to A) NUGC-4 cells and B) SNU-601 cells. Controls included an anti-RSV x anti-CD3 bispecific antibody, cells only, and secondary antibody only. The data show that each of the bsAbs dose-dependently bound to both NUGC-4 and SNU-601, with higher maximal binding to SNU-601 cells than to NUGC-4, which is consistent with the respective CLDN18.2 expression levels on each cell line.

[0045] FIG. 21A-21B depicts induction of RTCC (as indicated by decrease in live target cells) on A) NUGC-4 and B) SNU-601 cells after incubation for 24 hours with human PBMCs (20:1 effector to target cell ratio) and the following prototype anti-CLDN18.2 x anti-CD3 bispecific antibodies having murine CLDN18.2 ABD: XENP24645 (1+1 Fab-scFv-Fc with CD3-High), XENP24646 (1+1 Fab-scFv-Fc with CD3-High-Int #1), XENP24647 (2+1 Fab₂-scFv-Fc with CD3-High), and XENP24649 (2+1 Fab₂-scFv-Fc with CD3-Intermediate). Controls included an anti-RSV x anti-CD3 bispecific antibody, target cells only, and target cells and effector cells only. The data show that the bsAbs enhance killing of target cells (i.e. NUGC-4 and SNU-601 cells) as indicated by decrease in live cells.

[0046] FIG. 22A-22B depicts induction of RTCC (as indicated by increase in dead target cells) on A) NUGC-4 and B) SNU-601 cells after incubation for 24 hours with human PBMCs (20:1 effector to target cell ratio) and the following prototype anti-CLDN18.2 x anti-CD3 bispecific antibodies having murine CLDN18.2 ABD: XENP24645 (1+1 Fab-scFv-Fc with CD3-High), XENP24646 (1+1 Fab-scFv-Fc with CD3-High-Int #1), XENP24647 (2+1 Fab₂-scFv-Fc with CD3-High), XENP24648 (2+1 Fab₂-scFv-Fc with CD3-High Int #1), and XENP24649 (2+1 Fab₂-scFv-Fc with CD3-Intermediate). Controls included an anti-RSV x anti-CD3 bispecific antibody, target cells only, and target cells and effector cells only. The data show that the bsAbs enhance killing of target cells (i.e. NUGC-4 and SNU-601 cells) as indicated by increase in dead/dying cells.

[0047] FIG. 23A-23B depicts induction of RTCC (as indicated by decrease in live target cells) on A) NUGC-4 and B) SNU-601 cells after incubation for 48 hours with human PBMCs (20:1 effector to target cell ratio) and the following prototype anti-CLDN18.2 x anti-CD3 bispecific antibodies having murine CLDN18.2 ABD: XENP24645 (1+1 Fab-scFv-Fc with CD3-High), XENP24646 (1+1 Fab-scFv-Fc with CD3-High-Int #1), XENP24647 (2+1 Fab₂-scFv-Fc with CD3-High), and XENP24649 (2+1 Fab₂-scFv-Fc with CD3-Intermediate). Controls included an anti-RSV x anti-CD3 bispecific antibody, target cells only, and target cells and effector cells only. The data show that the bsAbs enhance killing of target cells (i.e. NUGC-4 and SNU-601 cells) as indicated by decrease in live cells.

[0048] FIG. 24A-24B depicts induction of RTCC (as indicated by increase in dead target cells) on A) NUGC-4 and B) SNU-601 cells after incubation for 48 hours with human PBMCs (20:1 effector to target cell ratio) and the following prototype anti-CLDN18.2 x anti-CD3 bispecific antibodies having murine CLDN18.2 ABD: XENP24645 (1+1 Fab-scFv-Fc with CD3-High), XENP24646 (1+1 Fab-scFv-Fc with CD3-High-Int #1), XENP24647 (2+1 Fab₂-scFv-Fc with CD3-High), and XENP24649 (2+1 Fab₂-scFv-Fc with CD3-Intermediate). Controls included an anti-RSV x anti-CD3 bispecific antibody, target cells only, and target cells and effector cells only. The data show that the bsAbs enhance killing of target cells (i.e. NUGC-4 and SNU-601 cells) as indicated by increase in dead/dying cells.

[0049] FIG. 25A-25C depicts percentage of CD4⁺ T cells expressing A) CD69, B) CD25, and C) CD107a following incubation of NUGC-4 cells for 48 hours with human PBMCs (20:1 effector to target cell ratio) and the following prototype anti-CLDN18.2 x anti-CD3 bispecific antibodies having murine CLDN18.2 ABD: XENP24645 (1+1 Fab-scFv-Fc with CD3-High), XENP24646 (1+1 Fab-scFv-Fc with CD3-High-Int #1), XENP24647 (2+1 Fab₂-scFv-Fc with CD3-High), and XENP24649 (2+1 Fab₂-scFv-Fc with CD3-Intermediate). Controls included an anti-RSV x anti-CD3 bispecific antibody, target cells only, and target cells and effector cells only. The data shows a trend consistent with RTCC, that is for example, higher affinity CD3 binding and/or bivalent CLDN18.2 binding enhance T cell activation and degranulation.

[0050] FIG. 26A-26C depicts percentage of CD8⁺ T cells expressing A) CD69, B) CD25, and C) CD107a following incubation of NUGC-4 cells for 48 hours with human PBMCs (20:1 effector to target cell ratio) and the following prototype anti-CLDN18.2 x anti-CD3 bispecific antibodies having murine CLDN18.2 ABD: XENP24645 (1+1 Fab-scFv-Fc with CD3-High), XENP24646 (1+1 Fab-scFv-Fc with CD3-High-Int #1), XENP24647 (2+1 Fab₂-scFv-Fc with CD3-High), and XENP24649 (2+1 Fab₂-scFv-Fc with CD3-Intermediate). Controls included an anti-RSV x anti-CD3 bispecific antibody, target cells only, and target cells and effector cells only. The data shows a trend consistent with RTCC, that is for example, higher affinity CD3 binding and/or bivalent CLDN18.2 binding enhance T cell activation and degranulation.

[0051] FIG. 27A-27C depicts percentage of CD4⁺ T cells expressing A) CD69, B) CD25, and C) CD107a following incubation of SNU-601 cells for 48 hours with human PBMCs (20:1 effector to target cell ratio) and the following prototype anti-CLDN18.2 x anti-CD3 bispecific antibodies having murine CLDN18.2 ABD: XENP24645 (1+1 Fab-scFv-Fc with CD3-High), XENP24646 (1+1 Fab-scFv-Fc with CD3-High-Int #1), XENP24647 (2+1 Fab₂-scFv-Fc with CD3-High), and XENP24649 (2+1 Fab₂-scFv-Fc with CD3-Intermediate). Controls included an anti-RSV x anti-CD3 bispecific antibody, target cells only, and target cells and effector cells only. The data shows a trend consistent with RTCC, that is for example, higher affinity CD3 binding and/or bivalent CLDN18.2 binding enhance T cell activation and degranulation.

[0052] FIG. 28A-28C depicts percentage of CD8⁺ T cells expressing A) CD69, B) CD25, and C) CD107a following incubation of SNU-601 cells for 48 hours with human PBMCs (20:1 effector to target cell ratio) and the following prototype anti-CLDN18.2 x anti-CD3 bispecific antibodies having murine CLDN18.2 ABD: XENP24645 (1+1 Fab-scFv-Fc with CD3-High), XENP24646 (1+1 Fab-scFv-Fc with CD3-High-Int #1), XENP24647 (2+1 Fab₂-scFv-Fc with CD3-High), and XENP24649 (2+1 Fab₂-scFv-Fc with CD3-Intermediate). Controls included an anti-RSV x anti-CD3 bispecific antibody, target cells only, and target cells and effector cells only. The data shows a trend consistent with RTCC, that is for example, higher affinity CD3 binding and/or bivalent CLDN18.2 binding enhance T cell activation and degranulation.

[0053] FIG. 29 depicts sequences for anti-CLDN18.2 antibodies with humanized variable regions with an ablation variant (E233P/L234V/L235A/G236del/S267K, “IgG1_PVA_/S267K”). The CDRs are underlined. As noted herein and is true for every sequence herein containing CDRs, the exact identification of the CDR locations may be slightly different depending on the numbering used as is shown in Table 1, and thus included herein are not only the CDRs that are underlined but also CDRs included within the V_{H} and V_{L} domains using other numbering systems.

[0054] FIG. 30 depicts germline identity of humanized CLDN18.2 ABDs in comparison to murine CLDN18.2 ABD.

[0055] FIG. 31A-31C depicts the amino acid sequences of anti-CLDN18.2 x anti-CD3 bispecific antibodies with humanized variable regions in the 1+1 Fab-scFv-Fc format. The antibodies are named using the Fab variable region first and the scFv variable region second, separated by a dash. CDRs are underlined and slashes indicate the border(s) of the variable regions. The scFv domain has orientation (N- to C-terminus) of V_{H}-ScFv linker-V_{L}, although this can be reversed. In addition, each sequence outlined herein can include or exclude the M428L/N434S variants in one or preferably both Fc domains, which results in longer half-life in serum.

[0056] FIG. 32A-32C depicts the amino acid sequences of anti-CLDN18.2 x anti-CD3 bispecific antibodies with humanized variable regions in the 2+1 Fab₂-scFv-Fc format. The antibodies are named using the Fab variable region first and the Fab-scFv variable regions second, separated by a dash. CDRs are underlined and slashes indicate the border(s) of the variable regions. The scFv domain has orientation (N- to C-terminus) of V_{H}-ScFv linker-V_{L}, although this can be reversed. In addition, each sequence outlined herein can include or exclude the M428L/N434S variants in one or preferably both Fc domains, which results in longer half-life in serum.

[0057] FIG. 33A-33B depicts the expression levels on A) SNU-601 cells and B) SNU-601(2E4) cells (enriched for CLDN18.2 expressing population) as determined by flow cytometry. The data show that the SNU-601(2E4) contains substantially higher population of CLDN18.2⁺ cells. Experiments in this section are performed using SNU-601(2E4) cells.

[0058] FIG. 34 depicts binding of by the following anti-CLDN18.2 x anti-CD3 bispecific antibodies having humanized CLDN18.2 ABD: XENP29472 (H1L1 CLDN18.2 ABD; 1+1 Fab-scFv-Fc with CD3-High), XENP29473 (H2L1 CLDN18.2 ABD; 1+1 Fab-scFv-Fc with CD3-High), XENP29474 (H1L1 CLDN18.2 ABD; 1+1 Fab-scFv-Fc with CD3-HighInt #1), XENP29475 (H2L1 CLDN18.2 ABD; 1+1 Fab-scFv-Fc with CD3-HighInt #1), XENP29476 (H1L1 CLDN18.2 ABD; 2+1 Fab₂-scFv-Fc with CD3-High), XENP29477 (H2L1 CLDN18.2 ABD; 2+1 Fab₂-scFv-Fc with CD3-High), XENP29478 (H1L1 CLDN18.2 ABD; 2+1 Fab₂-scFv-Fc with CD3-HighInt #1), and XENP29479 (H2L1 CLDN18.2 ABD; 2+1 Fab₂-scFv-Fc with CD3-HighInt #1) to SNU-601(2E4) cells. Controls used were XENP24644 (H0L0 CLDN18.2; bivalent mAb), XENP29470 (H1L1 CLDN18.2; bivalent mAb), XENP29471 (H2L1 CLDN18.2; bivalent mAb), XENP24645 (1+1 Fab-scFv-Fc with CD3-High), XENP24647 (2+1 Fab₂-scFv-Fc with CD3-High), cells only, and secondary antibody only. The data show that the bsAbs having humanized CLDN18.2 ABDs had similar binding to SNU-601(2E4) cells as bsAbs having murine CLDN18.2 ABDs indicating that humanization preserved the binding efficacy of the bsAbs. Notably, bsAbs in the “2+1 Fab2-scFv-Fc” format showed similar binding to bivalent anti-CLDN18.2 mAbs. Additionally, the data show that bsAbs based on the H1L1 humanized variant (e.g. XENP29472, XENP29474, XENP28476, and XENP29478) better preserved binding than did bsAbs based on the H2L1 humanized variant (e.g. XENP29473, XENP29475, XENP29477, and XENP29479).

[0059] FIG. 35A-35C depicts induction of RTCC on SNU-601(2E4) cells A) as indicated by decrease in number of CFSE⁺ SNU-601(2E4), B) as indicated by percentage of CFSE⁺ SNU-601(2E4) cells stained with Zombie Aqua, and C) as indicated by Zombie Aqua MFI on CFSE⁺ SNU-601(2E4) cells after incubation of CFSE-labeled SNU-601(2E4) for 24 hours with human PBMCs (10:1 effector to target cell ratio) and the following anti-CLDN18.2 x anti-CD3 bispecific antibodies having humanized CLDN18.2 ABD: XENP29472 (H1L1 CLDN18.2 ABD; 1+1 Fab-scFv-Fc with CD3-High), XENP29473 (H2L1 CLDN18.2 ABD; 1+1 Fab-scFv-Fc with CD3-High), XENP29474 (H1L1 CLDN18.2 ABD; 1+1 Fab-scFv-Fc with CD3-HighInt #1), XENP29475 (H2L1 CLDN18.2 ABD; 1+1 Fab-scFv-Fc with CD3-HighInt #1), XENP29476 (H1L1 CLDN18.2 ABD; 2+1 Fab₂-scFv-Fc with CD3-High), XENP29477 (H2L1 CLDN18.2 ABD; 2+1 Fab₂-scFv-Fc with CD3-High), XENP29478 (H1L1 CLDN18.2 ABD; 2+1 Fab₂-scFv-Fc with CD3-HighInt #1), and XENP29479 (H2L1 CLDN18.2 ABD; 2+1 Fab₂-scFv-Fc with CD3-HighInt #1) to SNU-601(2E4) cells. Controls used were XENP24645 (1+1 Fab-scFv-Fc with CD3-High), XENP24647 (2+1 Fab₂-scFv-Fc with CD3-High), cells only, and secondary antibody only. Consistent with the binding data, humanization preserved the induction of RTCC by the bsAbs having humanized CLDN18.2 ABDs.

[0060] FIG. 36A-36B depicts activation CD4⁺ T cells [as indicated by A) CD69 MFI on CD4⁺ T cells, and B) percentage of CD4⁺ T cells expressing CD69] after incubation of SNU-601(2E4) for 24 hours with human PBMCs (10:1 effector to target cell ratio) and the following anti-CLDN18.2 x anti-CD3 bispecific antibodies having humanized CLDN18.2 ABD: XENP29472 (H1L1 CLDN18.2 ABD; 1+1 Fab-scFv-Fc with CD3-High), XENP29473 (H2L1 CLDN18.2 ABD; 1+1 Fab-scFv-Fc with CD3-High), XENP29474 (H1L1 CLDN18.2 ABD; 1+1 Fab-scFv-Fc with CD3-HighInt #1), XENP29475 (H2L1 CLDN18.2 ABD; 1+1 Fab-scFv-Fc with CD3-HighInt #1), XENP29476 (H1L1 CLDN18.2 ABD; 2+1 Fab₂-scFv-Fc with CD3-High), XENP29477 (H2L1 CLDN18.2 ABD; 2+1 Fab₂-scFv-Fc with CD3-High), XENP29478 (H1L1 CLDN18.2 ABD; 2+1 Fab₂-scFv-Fc with CD3-HighInt #1), and XENP29479 (H2L1 CLDN18.2 ABD; 2+1 Fab₂-scFv-Fc with CD3-HighInt #1) to SNU-601(2E4) cells. Controls used were XENP24645 (1+1 Fab-scFv-Fc with CD3-High), XENP24647 (2+1 Fab₂-scFv-Fc with CD3-High), cells only, and secondary antibody only. Consistent with the binding data, humanization preserved T cell activation by the bsAbs having humanized CLDN18.2 ABDs.

[0061] FIG. 37A-37B depicts degranulation of CD4⁺ T cells [as indicated by A) CD107a MFI on CD4⁺ T cells, and B) percentage of CD4⁺ T cells expressing CD107a] after incubation of SNU-601(2E4) for 24 hours with human PBMCs (10:1 effector to target cell ratio) and the following anti-CLDN18.2 x anti-CD3 bispecific antibodies having humanized CLDN18.2 ABD: XENP29472 (H1L1 CLDN18.2 ABD; 1+1 Fab-scFv-Fc with CD3-High), XENP29473 (H2L1 CLDN18.2 ABD; 1+1 Fab-scFv-Fc with CD3-High), XENP29474 (H1L1 CLDN18.2 ABD; 1+1 Fab-scFv-Fc with CD3-HighInt #1), XENP29475 (H2L1 CLDN18.2 ABD; 1+1 Fab-scFv-Fc with CD3-HighInt #1), XENP29476 (H1L1 CLDN18.2 ABD; 2+1 Fab₂-scFv-Fc with CD3-High), XENP29477 (H2L1 CLDN18.2 ABD; 2+1 Fab₂-scFv-Fc with CD3-High), XENP29478 (H1L1 CLDN18.2 ABD; 2+1 Fab₂-scFv-Fc with CD3-HighInt #1), and XENP29479 (H2L1 CLDN18.2 ABD; 2+1 Fab₂-scFv-Fc with CD3-HighInt #1) to SNU-601(2E4) cells. Controls used were XENP24645 (1+1 Fab-scFv-Fc with CD3-High), XENP24647 (2+1 Fab₂-scFv-Fc with CD3-High), cells only, and secondary antibody only.

[0062] FIG. 38A-38B depicts activation CD8⁺ T cells [as indicated by A) CD69 MFI on CD8⁺ T cells, and B) percentage of CD8⁺ T cells expressing CD69] after incubation of SNU-601(2E4) for 24 hours with human PBMCs (10:1 effector to target cell ratio) and the following anti-CLDN18.2 x anti-CD3 bispecific antibodies having humanized CLDN18.2 ABD: XENP29472 (H1L1 CLDN18.2 ABD; 1+1 Fab-scFv-Fc with CD3-High), XENP29473 (H2L1 CLDN18.2 ABD; 1+1 Fab-scFv-Fc with CD3-High), XENP29474 (H1L1 CLDN18.2 ABD; 1+1 Fab-scFv-Fc with CD3-HighInt #1), XENP29475 (H2L1 CLDN18.2 ABD; 1+1 Fab-scFv-Fc with CD3-HighInt #1), XENP29476 (H1L1 CLDN18.2 ABD; 2+1 Fab₂-scFv-Fc with CD3-High), XENP29477 (H2L1 CLDN18.2 ABD; 2+1 Fab₂-scFv-Fc with CD3-High), XENP29478 (H1L1 CLDN18.2 ABD; 2+1 Fab₂-scFv-Fc with CD3-HighInt #1), and XENP29479 (H2L1 CLDN18.2 ABD; 2+1 Fab₂-scFv-Fc with CD3-HighInt #1) to SNU-601(2E4) cells. Controls used were XENP24645 (1+1 Fab-scFv-Fc with CD3-High), XENP24647 (2+1 Fab₂-scFv-Fc with CD3-High), cells only, and secondary antibody only. Consistent with the binding data, humanization preserved T cell activation by the bsAbs having humanized CLDN18.2 ABDs.

[0063] FIG. 39A-39B depicts degranulation of CD8⁺ T cells [as indicated by A) CD107a MFI on CD8⁺ T cells, and B) percentage of CD8⁺ T cells expressing CD107a] after incubation of SNU-601(2E4) for 24 hours with human PBMCs (10:1 effector to target cell ratio) and the following anti-CLDN18.2 x anti-CD3 bispecific antibodies having humanized CLDN18.2 ABD: XENP29472 (H1L1 CLDN18.2 ABD; 1+1 Fab-scFv-Fc with CD3-High), XENP29473 (H2L1 CLDN18.2 ABD; 1+1 Fab-scFv-Fc with CD3-High), XENP29474 (H1L1 CLDN18.2 ABD; 1+1 Fab-scFv-Fc with CD3-HighInt #1), XENP29475 (H2L1 CLDN18.2 ABD; 1+1 Fab-scFv-Fc with CD3-HighInt #1), XENP29476 (H1L1 CLDN18.2 ABD; 2+1 Fab₂-scFv-Fc with CD3-High), XENP29477 (H2L1 CLDN18.2 ABD; 2+1 Fab₂-scFv-Fc with CD3-High), XENP29478 (H1L1 CLDN18.2 ABD; 2+1 Fab₂-scFv-Fc with CD3-HighInt #1), and XENP29479 (H2L1 CLDN18.2 ABD; 2+1 Fab₂-scFv-Fc with CD3-HighInt #1) to SNU-601(2E4) cells. Controls used were XENP24645 (1+1 Fab-scFv-Fc with CD3-High), XENP24647 (2+1 Fab₂-scFv-Fc with CD3-High), cells only, and secondary antibody only.

[0064] FIG. 40A-40B depicts A) IFNγ and B) TNFα secretion by T cells after incubation of SNU-601(2E4) for 24 hours with human PBMCs (10:1 effector to target cell ratio) and the following anti-CLDN18.2 x anti-CD3 bispecific antibodies having humanized CLDN18.2 ABD: XENP29472 (H1L1 CLDN18.2 ABD; 1+1 Fab-scFv-Fc with CD3-High), XENP29473 (H2L1 CLDN18.2 ABD; 1+1 Fab-scFv-Fc with CD3-High), XENP29474 (H1L1 CLDN18.2 ABD; 1+1 Fab-scFv-Fc with CD3-HighInt #1), XENP29475 (H2L1 CLDN18.2 ABD; 1+1 Fab-scFv-Fc with CD3-HighInt #1), XENP29476 (H1L1 CLDN18.2 ABD; 2+1 Fab₂-scFv-Fc with CD3-High), XENP29477 (H2L1 CLDN18.2 ABD; 2+1 Fab₂-scFv-Fc with CD3-High), XENP29478 (H1LI CLDN18.2 ABD; 2+1 Fab₂-scFv-Fc with CD3-HighInt #1), and XENP29479 (H2L1 CLDN18.2 ABD; 2+1 Fab₂-scFv-Fc with CD3-HighInt #1) to SNU-601(2E4) cells. Controls used were XENP24645 (1+1 Fab-scFv-Fc with CD3-High) and XENP24647 (2+1 Fab₂-scFv-Fc with CD3-High). Consistent with the binding data, humanization preserved the induction of cytokine secretion by the bsAbs having humanized CLDN18.2 ABDs.

[0065] FIG. 41A-41M depicts the sequences of several useful 2+1 Fab₂-scFv-Fc bispecific antibody format heavy chain backbones based on human IgG1, including scFvs for 6 different anti-CD3 ABDs, in both orientations, as well as sequences including and excluding the “XTEND®” FcRn variants 428L/434S (sometimes also referred to as “LS” variants) but excluding the ABDs for the other antigen. That is, Chain 1 of each set is the -CH1-hinge-CH2-CH3 sequence (the “Fab-Fc side”), to which a VH1 sequence can be added (e.g. the C-terminus of the VH1 is joined at the slash “/”) to form a full heavy chain, VH1-CH1-hinge-CH2-CH3. Chain 2 of each set is the -anti-CD3 scFv-domain linker-CH2-CH3, to which a VH1-CH1-optional domain linker- is added (e.g. the C-terminus of the domain linker is joined at the slash “/”), to form the full chain, VH1-CH1-domain linker-scFv-domain linker-CH2-CH3; in this embodiment, the scFv can be in either orientation, such that the full chain is either VH1-CH1-domain linker-VH2-scFv linker-VL2-domain linker-CH2-CH3 or VH1-CH1-domain linker-VL2-scFv linker-VH2-domain linker-CH2-CH3 (note the sequences of FIG. 41 include both options). Chain 3 is the LC domain, to which VL1 can be added to form VL1-CL. CDRs are underlined, linkers are double underlined, and domain borders are noted with a slash. It should be noted that all of the Chain 2 sequences include as the domain linker between the C-terminus of the scFv and the N-terminus of the CH2 domain the sequence GGGGSGGGGSKTHTCPPCP (SEQ ID NO:29), which is a “flexible half hinge” domain linker; however, this linker can be replaced in any FIG. 41 Chain 2 sequence with any of the “useful domain linkers” of FIG. 5, with some embodiments replacing the SEQ ID NO:29 with SEQ ID NO:28, the “full hinge C220S variant”. Each of these sequences include preferred skew, pI and ablation variants.

[0066] FIG. 42A to 42J depict several formats of the present invention. The first is the 1+1 Fab-scFv-Fc format, with a first and a second anti-antigen binding domain. Additionally, mAb-Fv, mAb-scFv, Central-scFv, Central-Fv, one armed central-scFv, one scFv-mAb, scFv-mAb and a dual scFv format are all shown. For all of the scFv domains depicted, they can be either N- to C-terminus variable heavy-(optional linker)-variable light, or the opposite. In addition, for the one armed scFv-mAb, the scFv can be attached either to the N-terminus of a heavy chain monomer or to the N-terminus of the light chain.

### DETAILED DESCRIPTION OF THE INVENTION

### A. Overview

[0067] Anti-bispecific antibodies that co-engage CD3 and a tumor antigen target are used to redirect T cells to attack and lyse targeted tumor cells. Examples include the BiTE® and DART formats, which monovalently engage CD3 and a tumor antigen. While the CD3-targeting approach has shown considerable promise, a common side effect of such therapies is the associated production of cytokines, often leading to toxic cytokine release syndrome. Because the anti-CD3 binding domain of the bispecific antibody engages all T cells, the high cytokine-producing CD4 T cell subset is recruited. Moreover, the CD4 T cell subset includes regulatory T cells, whose recruitment and expansion can potentially lead to immune suppression and have a negative impact on long-term tumor suppression. In addition, these formats do not contain Fc domains and show very short serum half-lives in patients.

[0068] In particular, provided herein are anti-CD3, anti-CLDN18.2 bispecific antibodies in a variety of Formats such as those depicted in FIGS. 13 and 42. These bispecific antibodies are useful for the treatment of cancers, particularly those such as gastric, esophageal, and pancreatic cancers. Such antibodies are used to direct CD3+ effector T cells to CLDN18.2+ tumors, thereby allowing the CD3+ effector T cells to attack and lyse the CLDN18.2+ tumors.

[0069] Additionally, the invention provides bispecific antibodies that have different binding affinities to human CD3 that can alter or reduce the potential side effects of anti-CD3 therapy. That is, in some embodiments the present invention provides antibody constructs comprising anti-CD3 antigen binding domains that are “strong” or “high affinity” binders to CD3 (e.g. one example are heavy and light variable domains depicted as H1.30_L1.47 (optionally including a charged linker as appropriate)) and also bind to CLDN18.2. In other embodiments, the present invention provides antibody constructs comprising anti-CD3 antigen binding domains that are “lite” or “lower affinity” binders to CD3. Additional embodiments provides antibody constructs comprising anti-CD3 antigen binding domains that have intermediate or “medium” affinity to CD3 that also bind to CD38. While a very large number of anti-CD3 antigen binding domains (ABDs) can be used, particularly useful embodiments use 6 different anti-CD3 ABDs, although they can be used in two scFv orientations as discussed herein. Affinity is generally measured using a Biacore assay.

[0070] It should be appreciated that the “high, medium, low” anti-CD3 sequences of the present invention can be used in a variety of heterodimerization formats as depicted in Figures. In general, due to the potential side effects of T cell recruitment, preferred embodiments utilize formats that only bind CD3 monovalently, such as depicted in FIGS. 13A and 13B, and in the formats depicted herein, it is the CD3 ABD that is a scFv as more fully described herein. In contrast, the bispecific antibodies of the invention can bind CLDN18.2 either monovalently (e.g. FIG. 13A) or bivalently (e.g. FIG. 13B).

[0071] Accordingly, in one aspect, provided herein are heterodimeric antibodies that bind to two different antigens, e.g. the antibodies are “bispecific”, in that they bind two different target antigens, e.g. CD3 and CLDN18.2 as described herein. These heterodimeric antibodies can bind these target antigens either monovalently (e.g. there is a single antigen binding domain such as a variable heavy and variable light domain pair) or bivalently (there are two antigen binding domains that each independently bind the antigen). The heterodimeric antibodies provided herein are based on the use different monomers which contain amino acid substitutions that “skew” formation of heterodimers over homodimers, as is more fully outlined below, coupled with “pI variants” that allow simple purification of the heterodimers away from the homodimers, as is similarly outlined below. The heterodimeric bispecific antibodies provided generally rely on the use of engineered or variant Fc domains that can self-assemble in production cells to produce heterodimeric proteins, and methods to generate and purify such heterodimeric proteins.

### C. Nomenclature

[0072] The bispecific antibodies of the invention are listed in several different formats. Each polypeptide is given a unique “XENP” number, although as will be appreciated in the art, a longer sequence might contain a shorter one. For example, the heavy chain of the scFv side monomer of a 1+1 Fab-scFv-Fc format for a given sequence will have a first XENP number, while the scFv domain could have a different XENP number. Some molecules have three polypeptides, so the XENP number, with the components, is used as a name. Thus, the molecule XENP29472, which is in bottle opener format, comprises three sequences: XENP29472 Chain 1, XENP29472 Chain 2 and XENP29472 Chain 3 (FIG. 31A). These XENP numbers are in the sequence listing as well as identifiers, and used in the Figures. In addition, one molecule, comprising the three components, gives rise to multiple sequence identifiers. For example, the listing of the Fab monomer has the full length sequence, the variable heavy sequence and the three CDRs of the variable heavy sequence; the light chain has a full length sequence, a variable light sequence and the three CDRs of the variable light sequence; and the scFv-Fc domain has a full length sequence, an scFv sequence, a variable light sequence, 3 light CDRs, a scFv linker, a variable heavy sequence and 3 heavy CDRs; note that all molecules herein with a scFv domain use a single charged scFv linker (+H), although others can be used. In addition, the naming nomenclature of particular variable domains uses a “Hx.xx_Ly.yy” type of format, with the numbers being unique identifiers to particular variable chain sequences. Thus, the variable domain of the Fab side of XENP29472 is “H1L1”, which indicates that the variable heavy domain, H1, was combined with the light domain L1. In the case that these sequences are used as scFvs, the designation “H1L1”, indicates that the variable heavy domain, H1, was combined with the light domain, L1, and is in VH-linker-VL orientation, from N- to C-terminus. This molecule with the identical sequences of the heavy and light variable domains but in the reverse order would be named “L1H1”. Similarly, different constructs may “mix and match” the heavy and light chains as will be evident from the sequence listing and the Figures.

### D. Definitions

[0073] In order that the application may be more completely understood, several definitions are set forth below. Such definitions are meant to encompass grammatical equivalents.

[0074] By “ablation” herein is meant a decrease or removal of activity. Thus for example, “ablating FcγR binding” means the Fc region amino acid variant has less than 50% starting binding as compared to an Fc region not containing the specific variant, with more than 70-80-90-95-98% loss of activity being preferred, and in general, with the activity being below the level of detectable binding in a Biacore, SPR or BLI assay. Of particular use in the ablation of FcγR binding are those shown in FIG. 3, which generally are added to both monomers.

[0075] By “ADCC” or “antibody dependent cell-mediated cytotoxicity” as used herein is meant the cell-mediated reaction wherein nonspecific cytotoxic cells that express FcγRs recognize bound antibody on a target cell and subsequently cause lysis of the target cell. ADCC is correlated with binding to FcγRIIIa; increased binding to FcγRIIIa leads to an increase in ADCC activity.

[0076] By “ADCP” or antibody dependent cell-mediated phagocytosis as used herein is meant the cell-mediated reaction wherein nonspecific phagocytic cells that express FcγRs recognize bound antibody on a target cell and subsequently cause phagocytosis of the target cell.

[0077] By “antigen binding domain” or “ABD” herein is meant a set of six Complementary Determining Regions (CDRs) that, when present as part of a polypeptide sequence, specifically binds a target antigen as discussed herein. Thus, a “checkpoint antigen binding domain” binds a target checkpoint antigen as outlined herein. As is known in the art, these CDRs are generally present as a first set of variable heavy CDRs (VHCDRs or VHCDRs) and a second set of variable light CDRs (VLCDRs or VLCDRs), each comprising three CDRs: VHCDR1, VHCDR2, VHCDR3 for the heavy chain and VLCDR1, VLCDR2 and VLCDR3 for the light. The CDRs are present in the variable heavy and variable light domains, respectively, and together form an Fv region. (See Table 1 and related discussion above for CDR numbering schemes). Thus, in some cases, the six CDRs of the antigen binding domain are contributed by a variable heavy and a variable light domain. In a “Fab” format, the set of 6 CDRs are contributed by two different polypeptide sequences, the variable heavy domain (VH or VH; containing the VHCDR1, VHCDR2 and VHCDR3) and the variable light domain (VL or VL; containing the VLCDR1, VLCDR2 and VLCDR3), with the C-terminus of the VH domain being attached to the N-terminus of the CH1 domain of the heavy chain and the C-terminus of the VL domain being attached to the N-terminus of the constant light domain (and thus forming the light chain). In a scFv format, the VH and VL domains are covalently attached, generally through the use of a linker (a “scFv linker”) as outlined herein, into a single polypeptide sequence, which can be either (starting from the N-terminus) VH-linker-VL or VL-linker-VH, with the former being generally preferred (including optional domain linkers on each side, depending on the format used (e.g. from FIG. 13). In general, the C-terminus of the scFv domain is attached to the N-terminus of the hinge in the second monomer.

[0078] By “modification” herein is meant an amino acid substitution, insertion, and/or deletion in a polypeptide sequence or an alteration to a moiety chemically linked to a protein. For example, a modification may be an altered carbohydrate or PEG structure attached to a protein. By “amino acid modification” herein is meant an amino acid substitution, insertion, and/or deletion in a polypeptide sequence. For clarity, unless otherwise noted, the amino acid modification is always to an amino acid coded for by DNA, e.g. the 20 amino acids that have codons in DNA and RNA.

[0079] By “amino acid substitution” or “substitution” herein is meant the replacement of an amino acid at a particular position in a parent polypeptide sequence with a different amino acid. In particular, in some embodiments, the substitution is to an amino acid that is not naturally occurring at the particular position, either not naturally occurring within the organism or in any organism. For example, the substitution E272Y refers to a variant polypeptide, in this case an Fc variant, in which the glutamic acid at position 272 is replaced with tyrosine. For clarity, a protein which has been engineered to change the nucleic acid coding sequence but not change the starting amino acid (for example exchanging CGG (encoding arginine) to CGA (still encoding arginine) to increase host organism expression levels) is not an “amino acid substitution”; that is, despite the creation of a new gene encoding the same protein, if the protein has the same amino acid at the particular position that it started with, it is not an amino acid substitution.

[0080] By “amino acid insertion” or “insertion” as used herein is meant the addition of an amino acid sequence at a particular position in a parent polypeptide sequence. For example, −233E or 233E designates an insertion of glutamic acid after position 233 and before position 234. Additionally, −233ADE or A233ADE designates an insertion of AlaAspGlu after position 233 and before position 234.

[0081] By “amino acid deletion” or “deletion” as used herein is meant the removal of an amino acid sequence at a particular position in a parent polypeptide sequence. For example, E233- or E233 #, E233( ) or E233del designates a deletion of glutamic acid at position 233. Additionally, EDA233- or EDA233 # designates a deletion of the sequence GluAspAla that begins at position 233.

[0082] By “variant protein” or “protein variant”, or “variant” as used herein is meant a protein that differs from that of a parent protein by virtue of at least one amino acid modification. The protein variant has at least one amino acid modification compared to the parent protein, yet not so many that the variant protein will not align with the parental protein using an alignment program such as that described below. In general, variant proteins (such as variant Fc domains, etc., outlined herein, are generally at least 75, 80, 85, 90, 91, 92, 93, 94, 95, 96, 97, 98 or 99% identical to the parent protein, using the alignment programs described below, such as BLAST.

[0083] As described below, in some embodiments the parent polypeptide, for example an Fc parent polypeptide, is a human wild-type sequence, such as the heavy constant domain or Fc region from IgG1, IgG2, IgG3 or IgG4, although human sequences with variants can also serve as “parent polypeptides”, for example the IgG½ hybrid of US Publication 2006/0134105 can be included. The protein variant sequence herein will preferably possess at least about 80% identity with a parent protein sequence, and most preferably at least about 90% identity, more preferably at least about 95-98-99% identity. Accordingly, by “antibody variant” or “variant antibody” as used herein is meant an antibody that differs from a parent antibody by virtue of at least one amino acid modification, “IgG variant” or “variant IgG” as used herein is meant an antibody that differs from a parent IgG (again, in many cases, from a human IgG sequence) by virtue of at least one amino acid modification, and “immunoglobulin variant” or “variant immunoglobulin” as used herein is meant an immunoglobulin sequence that differs from that of a parent immunoglobulin sequence by virtue of at least one amino acid modification. “Fc variant” or “variant Fc” as used herein is meant a protein comprising an amino acid modification in an Fc domain as compared to an Fc domain of human IgG1, IgG2 or IgG4.

[0084] The Fc variants of the present invention are defined according to the amino acid modifications that compose them. Thus, for example, N434S or 434S is an Fc variant with the substitution serine at position 434 relative to the parent Fc polypeptide, wherein the numbering is according to the EU index. Likewise, M428L/N434S defines an Fc variant with the substitutions M428L and N434S relative to the parent Fc polypeptide. The identity of the WT amino acid may be unspecified, in which case the aforementioned variant is referred to as 428L/434S. It is noted that the order in which substitutions are provided is arbitrary, that is to say that, for example, N434S/M428L is the same Fc variant as M428L/N434S, and so on. For all positions discussed in the present invention that relate to antibodies, unless otherwise noted, amino acid position numbering is according to the EU index. The EU index or EU index as in Kabat or EU numbering scheme refers to the numbering of the EU antibody. Kabat et al. collected numerous primary sequences of the variable regions of heavy chains and light chains. Based on the degree of conservation of the sequences, they classified individual primary sequences into the CDR and the framework and made a list thereof (see SEQUENCES OF IMMUNOLOGICAL INTEREST, 5th edition, NIH publication, No. 91-3242, E. A. Kabat et al., entirely incorporated by reference). See also Edelman et al., 1969, Proc Natl Acad Sci USA 63:78-85, hereby entirely incorporated by reference. The modification can be an addition, deletion, or substitution.

[0085] By “protein” herein is meant at least two covalently attached amino acids, which includes proteins, polypeptides, oligopeptides and peptides. In addition, polypeptides that make up the antibodies of the invention may include synthetic derivatization of one or more side chains or termini, glycosylation, PEGylation, circular permutation, cyclization, linkers to other molecules, fusion to proteins or protein domains, and addition of peptide tags or labels.

[0086] By “residue” as used herein is meant a position in a protein and its associated amino acid identity. For example, Asparagine 297 (also referred to as Asn297 or N297) is a residue at position 297 in the human antibody IgG1.

[0087] By “Fab” or “Fab region” as used herein is meant the polypeptide that comprises the VH, CH1, VL, and CL immunoglobulin domains, generally on two different polypeptide chains (e.g. VH-CH1 on one chain and VL-CL on the other). Fab may refer to this region in isolation, or this region in the context of a bispecific antibody of the invention. In the context of a Fab, the Fab comprises an Fv region in addition to the CH1 and CL domains.

[0088] By “Fv” or “Fv fragment” or “Fv region” as used herein is meant a polypeptide that comprises the VL and VH domains of an ABD. Fv regions can be formatted as both Fabs (as discussed above, generally two different polypeptides that also include the constant regions as outlined above) and scFvs, where the VL and VH domains are combined (generally with a linker as discussed herein) to form an scFv.

[0089] By “single chain Fv” or “scFv” herein is meant a variable heavy domain covalently attached to a variable light domain, generally using a scFv linker as discussed herein, to form a scFv or scFv domain. A scFv domain can be in either orientation from N- to C-terminus (VH-linker-VL or VL-linker-VH). In the sequences depicted in the sequence listing and in the figures, the order of the VH and VL domain is indicated in the name, e.g. H.X_L.Y means N- to C-terminal is VH-linker-VL, and L. Y_H.X is VL-linker-VH.

[0090] By “IgG subclass modification” or “isotype modification” as used herein is meant an amino acid modification that converts one amino acid of one IgG isotype to the corresponding amino acid in a different, aligned IgG isotype. For example, because IgG1 comprises a tyrosine and IgG2 a phenylalanine at EU position 296, a F296Y substitution in IgG2 is considered an IgG subclass modification.

[0091] By “non-naturally occurring modification” as used herein is meant an amino acid modification that is not isotypic. For example, because none of the human IgGs comprise a serine at position 434, the substitution 434S in IgG1, IgG2, IgG3, or IgG4 (or hybrids thereof) is considered a non-naturally occurring modification.

[0092] By “amino acid” and “amino acid identity” as used herein is meant one of the 20 naturally occurring amino acids that are coded for by DNA and RNA.

[0093] By “effector function” as used herein is meant a biochemical event that results from the interaction of an antibody Fc region with an Fc receptor or ligand. Effector functions include but are not limited to ADCC, ADCP, and CDC.

[0094] By “IgG Fc ligand” as used herein is meant a molecule, preferably a polypeptide, from any organism that binds to the Fc region of an IgG antibody to form an Fc/Fc ligand complex. Fc ligands include but are not limited to FcγRIs, FcγRIIs, FcγRIIIs, FcRn, C1q, C3, mannan binding lectin, mannose receptor, staphylococcal protein A, streptococcal protein G, and viral FcγR. Fc ligands also include Fc receptor homologs (FcRH), which are a family of Fc receptors that are homologous to the FcγRs (Davis et al., 2002, Immunological Reviews 190:123-136, entirely incorporated by reference). Fc ligands may include undiscovered molecules that bind Fc. Particular IgG Fc ligands are FcRn and Fc gamma receptors. By “Fc ligand” as used herein is meant a molecule, preferably a polypeptide, from any organism that binds to the Fc region of an antibody to form an Fc/Fc ligand complex.

[0095] By “Fc gamma receptor”, “FcγR” or “FcgammaR” as used herein is meant any member of the family of proteins that bind the IgG antibody Fc region and is encoded by an FcγR gene. In humans this family includes but is not limited to FcγRI (CD64), including isoforms FcγRIa, FcγRIb, and FcγRIc; FcγRII (CD32), including isoforms FcγRIIa (including allotypes H131 and R131), FcγRIIb (including FcγRIIb-1 and FcγRIIb-2), and FcγRIIc; and FcγRIII (CD16), including isoforms FcγRIIIa (including allotypes V158 and F158) and FcγRIIIb (including allotypes FcγRIIb-NA1 and FcγRIIb-NA2) (Jefferis et al., 2002, Immunol Lett 82:57-65, entirely incorporated by reference), as well as any undiscovered human FcγRs or FcγR isoforms or allotypes. An FcγR may be from any organism, including but not limited to humans, mice, rats, rabbits, and monkeys. Mouse FcγRs include but are not limited to FcγRI (CD64), FcγRII (CD32), FcγRIII (CD16), and FcγRIII-2 (CD16-2), as well as any undiscovered mouse FcγRs or FcγR isoforms or allotypes.

[0096] By “FcRn” or “neonatal Fc Receptor” as used herein is meant a protein that binds the IgG antibody Fc region and is encoded at least in part by an FcRn gene. The FcRn may be from any organism, including but not limited to humans, mice, rats, rabbits, and monkeys. As is known in the art, the functional FcRn protein comprises two polypeptides, often referred to as the heavy chain and light chain. The light chain is beta-2-microglobulin and the heavy chain is encoded by the FcRn gene. Unless otherwise noted herein, FcRn or an FcRn protein refers to the complex of FcRn heavy chain with beta-2-microglobulin. A variety of FcRn variants used to increase binding to the FcRn receptor, and in some cases, to increase serum half-life. An “FcRn variant” is one that increases binding to the FcRn receptor, and suitable FcRn variants are shown below.

[0097] By “parent polypeptide” as used herein is meant a starting polypeptide that is subsequently modified to generate a variant. The parent polypeptide may be a naturally occurring polypeptide, or a variant or engineered version of a naturally occurring polypeptide. Accordingly, by “parent immunoglobulin” as used herein is meant an unmodified immunoglobulin polypeptide that is modified to generate a variant, and by “parent antibody” as used herein is meant an unmodified antibody that is modified to generate a variant antibody. It should be noted that “parent antibody” includes known commercial, recombinantly produced antibodies as outlined below. In this context, a “parent Fc domain” will be relative to the recited variant; thus, a “variant human IgG1 Fc domain” is compared to the parent Fc domain of human IgG1, a “variant human IgG4 Fc domain” is compared to the parent Fc domain human IgG4, etc.

[0098] By “Fc” or “Fc region” or “Fc domain” as used herein is meant the polypeptide comprising the CH2-CH3 domains of an IgG molecule, and in some cases, inclusive of the hinge. In EU numbering for human IgG1, the CH2-CH3 domain comprises amino acids 231 to 447, and the hinge is 216 to 230. Thus the definition of “Fc domain” includes both amino acids 231-447 (CH2-CH3) or 216-447 (hinge-CH2-CH3), or fragments thereof. An “Fc fragment” in this context may contain fewer amino acids from either or both of the N- and C-termini but still retains the ability to form a dimer with another Fc domain or Fc fragment as can be detected using standard methods, generally based on size (e.g. non-denaturing chromatography, size exclusion chromatography, etc.) Human IgG Fc domains are of particular use in the present invention, and can be the Fc domain from human IgG1, IgG2 or IgG4.

[0099] A “variant Fc domain” contains amino acid modifications as compared to a parental Fc domain. Thus, a “variant human IgG1 Fc domain” is one that contains amino acid modifications (generally amino acid substitutions, although in the case of ablation variants, amino acid deletions are included) as compared to the human IgG1 Fc domain. In general, variant Fc domains have at least about 80, 85, 90, 95, 97, 98 or 99 percent identity to the corresponding parental human IgG Fc domain (using the identity algorithms discussed below, with one embodiment utilizing the BLAST algorithm as is known in the art, using default parameters). Alternatively, the variant Fc domains can have from 1, 2, 3, 4, 5, 6, 7, 8, 9, 10, 11,12, 13, 14, 15, 16, 11, 12, 13, 14, 15, 16, 17, 18, 19 or 20 amino acid modifications as compared to the parental Fc domain. Alternatively, the variant Fc domains can have up to 1, 2, 3, 4, 5, 6, 7, 8, 9, 10, 11, 12, 13, 14, 15, 16, 11, 12, 13, 14, 15, 16, 17, 18, 19 or 20 amino acid modifications as compared to the parental Fc domain. Additionally, as discussed herein, the variant Fc domains herein still retain the ability to form a dimer with another Fc domain as measured using known techniques as described herein, such as non-denaturing gel electrophoresis.

[0100] By “heavy chain constant region” herein is meant the CH1-hinge-CH2-CH3 portion of an antibody (or fragments thereof), excluding the variable heavy domain; in EU numbering of human IgG1 this is amino acids 118-447 By “heavy chain constant region fragment” herein is meant a heavy chain constant region that contains fewer amino acids from either or both of the N- and C-termini but still retains the ability to form a dimer with another heavy chain constant region.

[0101] By “position” as used herein is meant a location in the sequence of a protein. Positions may be numbered sequentially, or according to an established format, for example the EU index for antibody numbering.

[0102] By “target antigen” as used herein is meant the molecule that is bound specifically by the antigen binding domain comprising the variable regions of a given antibody. As discussed below, in the present case the target antigens are checkpoint inhibitor proteins.

[0103] By “strandedness” in the context of the monomers of the heterodimeric antibodies of the invention herein is meant that, similar to the two strands of DNA that “match”, heterodimerization variants are incorporated into each monomer so as to preserve the ability to “match” to form heterodimers. For example, if some pI variants are engineered into monomer A (e.g. making the pI higher) then steric variants that are “charge pairs” that can be utilized as well do not interfere with the pI variants, e.g. the charge variants that make a pI higher are put on the same “strand” or “monomer” to preserve both functionalities. Similarly, for “skew” variants that come in pairs of a set as more fully outlined below, the skilled artisan will consider pI in deciding into which strand or monomer one set of the pair will go, such that pI separation is maximized using the pI of the skews as well.

[0104] By “target cell” as used herein is meant a cell that expresses a target antigen.

[0105] By “host cell” in the context of producing a bispecific antibody according to the invention herein is meant a cell that contains the exogeneous nucleic acids encoding the components of the bispecific antibody and is capable of expressing the bispecific antibody under suitable conditions. Suitable host cells are discussed below.

[0106] By “variable region” or “variable domain” as used herein is meant the region of an immunoglobulin that comprises one or more Ig domains substantially encoded by any of the Vκ, Vλ, and/or VH genes that make up the kappa, lambda, and heavy chain immunoglobulin genetic loci respectively, and contains the CDRs that confer antigen specificity. Thus, a “variable heavy domain” pairs with a “variable light domain” to form an antigen binding domain (“ABD”). In addition, each variable domain comprises three hypervariable regions (“complementary determining regions,” “CDRs”) (VHCDR1, VHCDR2 and VHCDR3 for the variable heavy domain and VLCDR1, VLCDR2 and VLCDR3 for the variable light domain) and four framework (FR) regions, arranged from amino-terminus to carboxy-terminus in the following order: FR1-CDR1-FR2-CDR2-FR3-CDR3-FR4.

[0107] By “wild type or WT” herein is meant an amino acid sequence or a nucleotide sequence that is found in nature, including allelic variations. A WT protein has an amino acid sequence or a nucleotide sequence that has not been intentionally modified.

[0108] The invention provides a number of antibody domains that have sequence identity to human antibody domains. Sequence identity between two similar sequences (e.g., antibody variable domains) can be measured by algorithms such as that of Smith, T. F. & Waterman, M. S. (1981) “Comparison Of Biosequences,” Adv. Appl. Math. 2:482 [local homology algorithm]; Needleman, S. B. & Wunsch, C D. (1970) “A General Method Applicable To The Search For Similarities In The Amino Acid Sequence Of Two Proteins,” J. Mol. Biol.48:443 [homology alignment algorithm], Pearson, W. R. & Lipman, D. J. (1988) “Improved Tools For Biological Sequence Comparison,” Proc. Natl. Acad. Sci. (U.S.A.) 85:2444 [search for similarity method]; or Altschul, S. F. et al, (1990) “Basic Local Alignment Search Tool,” J. Mol. Biol. 215:403-10, the “BLAST” algorithm, see https://blast.ncbi.nlm.nih.gov/Blast.cgi. When using any of the aforementioned algorithms, the default parameters (for Window length, gap penalty, etc.) are used. In one embodiment, sequence identity is done using the BLAST algorithm, using default parameters

[0109] The antibodies of the present invention are generally isolated or recombinant. “Isolated,” when used to describe the various polypeptides disclosed herein, means a polypeptide that has been identified and separated and/or recovered from a cell or cell culture from which it was expressed. Ordinarily, an isolated polypeptide will be prepared by at least one purification step. An “isolated antibody,” refers to an antibody which is substantially free of other antibodies having different antigenic specificities. “Recombinant” means the antibodies are generated using recombinant nucleic acid techniques in exogeneous host cells, and they can be isolated as well.

[0110] “Specific binding” or “specifically binds to” or is “specific for” a particular antigen or an epitope means binding that is measurably different from a non-specific interaction. Specific binding can be measured, for example, by determining binding of a molecule compared to binding of a control molecule, which generally is a molecule of similar structure that does not have binding activity. For example, specific binding can be determined by competition with a control molecule that is similar to the target.

[0111] Specific binding for a particular antigen or an epitope can be exhibited, for example, by an antibody having a KD for an antigen or epitope of at least about 10⁻⁴ M, at least about 10⁻⁵ M, at least about 10⁻⁶ M, at least about 10⁻⁷ M, at least about 10⁻⁸ M, at least about 10⁻⁹ M, alternatively at least about 10⁻¹⁰ M, at least about 10⁻¹¹ M, at least about 10⁻¹² M, or greater, where KD refers to a dissociation rate of a particular antibody-antigen interaction. Typically, an antibody that specifically binds an antigen will have a KD that is 20-, 50-, 100-, 500-, 1000-, 5,000-, 10,000- or more times greater for a control molecule relative to the antigen or epitope.

[0112] Also, specific binding for a particular antigen or an epitope can be exhibited, for example, by an antibody having a KA or Ka for an antigen or epitope of at least 20-, 50-, 100-, 500-, 1000-, 5,000-, 10,000- or more times greater for the epitope relative to a control, where KA or Ka refers to an association rate of a particular antibody-antigen interaction. Binding affinity is generally measured using a Biacore, SPR or BLI assay.

### E. Antibodies

[0113] In one aspect, provided herein are bispecific antibodies that bind to CLDN18.2 and CD3, in various formats as outlined below, and generally depicted in FIGS. 13 and 42. These bispecific, heterodimeric antibodies include a CLDN18.2 binding domain. In certain embodiments, the CLDN18.2 binding domain includes the VHCDR1, VHCDR2, VHCDR3, VLCDR1, VLCDR2 and VLCDR3 sequences of an CLDN18.2 binding domain selected from the group consisting of those depicted in FIG. 10. In some embodiments, the CLDN18.2 binding domain includes the underlined VHCDR1, VHCDR2, VHCDR3, VLCDR1, VLCDR2 and VLCDR3 sequences of an CLDN18.2 binding domain selected from those depicted in FIG. 10.

[0114] These bispecific heterodimeric antibodies bind CLDN18.2 and CD3. Such antibodies include a CD3 binding domain and at least one CLDN18.2 binding domain. Any suitable CLDN18.2 binding domain can be included in the anti-CLDN18.2 X anti-CD3 bispecific antibody. In some embodiments, the anti-CLDN18.2 X anti-CD3 bispecific antibody includes one, two, three, four or more CLDN18.2 binding domains, including but not limited to those depicted in FIG. 10. In certain embodiments, the anti-CLDN18.2 X anti-CD3 antibody includes a CLDN18.2 binding domain that includes the VHCDR1, VHCDR2, VHCDR3, VLCDR1, VLCDR2 and VLCDR3 sequences of an CLDN18.2 binding domain selected from the group consisting of those depicted in FIG. 10. In some embodiments, the anti-CLDN18.2 X anti-CD3 antibody includes a CLDN18.2 binding domain that includes the underlined VHCDR1, VHCDR2, VHCDR3, VLCDR1, VLCDR2 and VLCDR3 sequences of an CLDN18.2 binding domain selected from the group consisting of those depicted in FIG. 10. In some embodiments, the anti-CLDN18.2 X anti-CD3 antibody includes a CLDN18.2 binding domain that includes the variable heavy domain and variable light domain of an CLDN18.2 binding domain selected from the group consisting of those depicted in FIG. 10. In an exemplary embodiment, the anti-CLDN18.2 X anti-CD3 antibody includes an anti-CLDN18.2 H1L1 or an H2L1 binding domain.

[0115] The anti-CLDN18.2 x anti-CD3 antibody provided herein can include any suitable CD3 binding domain. In certain embodiments, the anti-CLDN18.2 X anti-CD3 antibody includes a CD3 binding domain that includes the VHCDR1, VHCDR2, VHCDR3, VLCDR1, VLCDR2 and VLCDR3 sequences of a CD3 binding domain selected from the group consisting of those depicted in FIGS. 12. In some embodiments, the anti-CLDN18.2 X anti-CD3 antibody includes a CD3 binding domain that includes the underlined VHCDR1, VHCDR2, VHCDR3, VLCDR1, VLCDR2 and VLCDR3 sequences of a CD3 binding domain selected from the group consisting of those depicted in FIG. 12. In some embodiments, the anti-CLDN18.2 X anti-CD3 antibody includes a CD3 binding domain that includes the variable heavy domain and variable light domain of a CD3 binding domain selected from the group consisting of those depicted in FIG. 12. In some embodiments, the CD3 binding domain is selected from anti-CD3 H1.30_L1.47, anti-CD3 H1.32_L1.47; anti-CD3 H1.89_L1.48; anti-CD3 H1.90_L1.47; Anti-CD3 H1.33_L1.47; and anti-CD3 H1.31_L1.47. As outlined herein, these anti-CD3 antigen binding domains (CD3-ABDs) can be used in scFv formats in either orientation (e.g. from N- to C-terminal, VH-scFv linker-VL or VL-scFv linker-VH).

[0116] As used herein, term “antibody” is used generally. Antibodies that find use in the present invention can take on a number of formats as described herein, including traditional antibodies as well as antibody derivatives, fragments and mimetics, described herein.

[0117] Traditional antibody structural units typically comprise a tetramer. Each tetramer is typically composed of two identical pairs of polypeptide chains, each pair having one “light” (typically having a molecular weight of about 25 kDa) and one “heavy” chain (typically having a molecular weight of about 50-70 kDa). Human light chains are classified as kappa and lambda light chains. The present invention is directed to the IgG class, which has several subclasses, including, but not limited to IgG1, IgG2, IgG3, and IgG4. It should be noted that IgG1 has different allotypes with polymorphisms at 356 (D or E) and 358 (L or M). The sequences depicted herein use the 356D/358M allotype, however the other allotype is included herein. That is, any sequence inclusive of an IgG1 Fc domain included herein can have 356E/358L replacing the 356D/358M allotype.

[0118] In addition, many of the antibodies herein have at least one the cysteines at position 220 replaced by a serine; generally this is the on the “scFv monomer” side for most of the sequences depicted herein, although it can also be on the “Fab monomer” side, or both, to reduce disulfide formation. Specifically included within the sequences herein are one or both of these cysteines replaced (C220S).

[0119] Thus, “isotype” as used herein is meant any of the subclasses of immunoglobulins defined by the chemical and antigenic characteristics of their constant regions. It should be understood that therapeutic antibodies can also comprise hybrids of isotypes and/or subclasses. For example, as shown in US Publication 2009/0163699, incorporated by reference, the present invention includes the use of human IgG1/G2 hybrids.

[0120] The hypervariable region generally encompasses amino acid residues from about amino acid residues 24-34 (LCDR1; “L” denotes light chain), 50-56 (LCDR2) and 89-97 (LCDR3) in the light chain variable region and around about 31-35B (HCDR1; “H” denotes heavy chain), 50-65 (HCDR2), and 95-102 (HCDR3) in the heavy chain variable region; Kabat et al., SEQUENCES OF PROTEINS OF IMMUNOLOGICAL INTEREST, 5th Ed. Public Health Service, National Institutes of Health, Bethesda, Md. (1991) and/or those residues forming a hypervariable loop (e.g. residues 26-32 (LCDR1), 50-52 (LCDR2) and 91-96 (LCDR3) in the light chain variable region and 26-32 (HCDR1), 53-55 (HCDR2) and 96-101 (HCDR3) in the heavy chain variable region; Chothia and Lesk (1987) J. Mol. Biol. 196:901-917. Specific CDRs of the invention are described below.

[0121] As will be appreciated by those in the art, the exact numbering and placement of the CDRs can be different among different numbering systems. However, it should be understood that the disclosure of a variable heavy and/or variable light sequence includes the disclosure of the associated (inherent) CDRs. Accordingly, the disclosure of each variable heavy region is a disclosure of the VHCDRs (e.g. VHCDR1, VHCDR2 and VHCDR3) and the disclosure of each variable light region is a disclosure of the VLCDRs (e.g. VLCDR1, VLCDR2 and VLCDR3). A useful comparison of CDR numbering is as below, see Lafranc et al., Dev. Comp. Immunol. 27(1):55-77 (2003):

TABLE 1

| | Kabat + | | | | | | |
|---|---|---|---|---|---|---|---|
| | Chothia | IMGT | Kabat | AbM | Chothia | Contact | Xencor |
| VHCDR1 | 26-35 | 27-38 | 31-35 | 26-35 | 26-32 | 30-35 | 27-35 |
| VHCDR2 | 50-65 | 56-65 | 50-65 | 50-58 | 52-56 | 47-58 | 54-61 |
| VHCDR3 | 95-102 | 105-117 | 95-102 | 95-102 | 95-102 | 93-101 | 103-116 |
| VLCDR1 | 24-34 | 27-38 | 24-34 | 24-34 | 24-34 | 30-36 | 27-38 |
| VLCDR2 | 50-56 | 56-65 | 50-56 | 50-56 | 50-56 | 46-55 | 56-62 |
| VLCDR3 | 89-97 | 105-117 | 89-97 | 89-97 | 89-97 | 89-96 | 97-105 |

[0122] Throughout the present specification, the Kabat numbering system is generally used when referring to a residue in the variable domain (approximately, residues 1-107 of the light chain variable region and residues 1-113 of the heavy chain variable region) and the EU numbering system for Fc regions (e.g., Kabat et al., supra (1991)).

[0123] Another type of Ig domain of the heavy chain is the hinge region. By “hinge” or “hinge region” or “antibody hinge region” or “hinge domain” herein is meant the flexible polypeptide comprising the amino acids between the first and second constant domains of an antibody. Structurally, the IgG CH1 domain ends at EU position 215, and the IgG CH2 domain begins at residue EU position 231. Thus for IgG the antibody hinge is herein defined to include positions 216 (E216 in IgG1) to 230 (p230 in IgG1), wherein the numbering is according to the EU index as in Kabat. In some cases, a “hinge fragment” is used, which contains fewer amino acids at either or both of the N- and C-termini of the hinge domain. As discussed below, sometimes the hinge is a domain linker; in these embodiments, useful domain linkers based on the hinge are shown in FIG. 5, and in particular, SEQ ID NO:28 can find particular use in the “1+1 Fab-scFv-Fc”, as well as in the “2+1 Fab₂-scFv-Fc” format. As noted herein, pI variants can be made in the hinge region as well.

[0124] The light chain generally comprises two domains, the variable light domain (containing the light chain CDRs and together with the variable heavy domains forming the Fv region), and a constant light chain region (often referred to as CL or Cκ).

[0125] Another region of interest for additional substitutions, outlined below, is the Fc region.

[0126] The present invention provides a large number of different CDR sets. In this case, a “full CDR set” comprises the three variable light and three variable heavy CDRs, e.g. a VLCDR1, VLCDR2, VLCDR3, VHCDR1, VHCDR2 and VHCDR3. These can be part of a larger variable light or variable heavy domain, respectfully. In addition, as more fully outlined herein, the variable heavy and variable light domains can be on separate polypeptide chains, when a heavy and light chain is used (for example when Fabs are used), or on a single polypeptide chain in the case of scFv sequences.

[0127] The CDRs contribute to the formation of the antigen-binding, or more specifically, epitope binding site of antibodies. “Epitope” refers to a determinant that interacts with a specific antigen binding site in the variable region of an antibody molecule known as a paratope. Epitopes are groupings of molecules such as amino acids or sugar side chains and usually have specific structural characteristics, as well as specific charge characteristics. A single antigen may have more than one epitope.

[0128] The epitope may comprise amino acid residues directly involved in the binding (also called immunodominant component of the epitope) and other amino acid residues, which are not directly involved in the binding, such as amino acid residues which are effectively blocked by the specifically antigen binding peptide; in other words, the amino acid residue is within the footprint of the specifically antigen binding peptide.

[0129] Epitopes may be either conformational or linear. A conformational epitope is produced by spatially juxtaposed amino acids from different segments of the linear polypeptide chain. A linear epitope is one produced by adjacent amino acid residues in a polypeptide chain. Conformational and nonconformational epitopes may be distinguished in that the binding to the former but not the latter is lost in the presence of denaturing solvents.

[0130] An epitope typically includes at least 3, and more usually, at least 5 or 8-10 amino acids in a unique spatial conformation. Antibodies that recognize the same epitope can be verified in a simple immunoassay showing the ability of one antibody to block the binding of another antibody to a target antigen, for example “binning.” As outlined below, the invention not only includes the enumerated antigen binding domains and antibodies herein, but those that compete for binding with the epitopes bound by the enumerated antigen binding domains.

[0131] Thus, the present invention provides different antibody domains. As described herein and known in the art, the heterodimeric antibodies of the invention comprise different domains within the heavy and light chains, which can be overlapping as well. These domains include, but are not limited to, the Fc domain, the CH1 domain, the CH2 domain, the CH3 domain, the hinge domain, the heavy constant domain (CH1-hinge-Fc domain or CH1-hinge-CH2-CH3), the variable heavy domain, the variable light domain, the light constant domain, Fab domains and scFv domains.

[0132] Thus, the “Fc domain” includes the -CH2-CH3 domain, and optionally a hinge domain (-hinge domain-CH2-CH3) (again, with many embodiments relying on a hinge domain from human IgG1 with a C220S variant). In the embodiments herein, particularly for the “1+1” format, when a scFv is attached to an Fc domain, it is the C-terminus of the scFv construct that is attached to all or part of the hinge of the Fc domain; for example, it is generally attached to the sequence EPKS (SEQ ID NO: 473) which is the beginning of the hinge. In some cases, for example in the “2+1” format, the domain linker can be a combination of flexible linker amino acids as well as part or all of the hinge; for example, SEQ ID NO:29 is such an example.

[0133] The embodiments of the invention comprise at least one scFv domain, which, while not naturally occurring, generally includes a variable heavy domain and a variable light domain, linked together by a scFv linker. As outlined herein, while the scFv domain is generally from N- to C-terminus oriented as VH-scFv linker-VL, this can be reversed for any of the scFv domains (or those constructed using VH and VL sequences from Fabs), to VL-scFv linker-VH, with optional linkers at one or both ends depending on the format (see generally FIGS. 13 and 42).

### (a) Linkers

[0134] As shown herein, there are a number of suitable linkers (for use as either domain linkers or scFv linkers) that can be used to covalently attach the recited domains, including traditional peptide bonds, generated by recombinant techniques. In some embodiments, the linker peptide may predominantly include the following amino acid residues: Gly, Ser, Ala, or Thr. The linker peptide should have a length that is adequate to link two molecules in such a way that they assume the correct conformation relative to one another so that they retain the desired activity. In one embodiment, the linker is from about 1 to 50 amino acids in length, preferably about 1 to 30 amino acids in length. In one embodiment, linkers of 1 to 20 amino acids in length may be used, with from about 5 to about 10 amino acids finding use in some embodiments. Useful linkers include glycine-serine polymers, including for example (GS)n, (GSGGS)n (SEQ ID NO: 474), (GGGGS)n (SEQ ID NO: 475), and (GGGS)n (SEQ ID NO: 476), where n is an integer of at least one (and generally from 3 to 4), glycine-alanine polymers, alanine-serine polymers, and other flexible linkers, some of which are shown in FIG. 5. Alternatively, a variety of nonproteinaceous polymers, including but not limited to polyethylene glycol (PEG), polypropylene glycol, polyoxyalkylenes, or copolymers of polyethylene glycol and polypropylene glycol, may find use as linkers.

[0135] Other linker sequences may include any sequence of any length of CL/CH1 domain but not all residues of CL/CH1 domain; for example the first 5-12 amino acid residues of the CL/CH1 domains. Linkers can be derived from immunoglobulin light chain, for example Cκ or Cλ. Linkers can be derived from immunoglobulin heavy chains of any isotype, including for example Cγ1, Cγ2, Cγ3, Cγ4, Cα1, Cα2, Cδ, Cϵ, and Cμ. Linker sequences may also be derived from other proteins such as Ig-like proteins (e.g. TCR, FcR, KIR), hinge region-derived sequences, and other natural sequences from other proteins.

[0136] In some embodiments, the linker is a “domain linker”, used to link any two domains as outlined herein together. For example, in FIG. 42F, there may be a domain linker that attaches the C-terminus of the CH1 domain of the Fab to the N-terminus of the scFv, with another optional domain linker attaching the C-terminus of the scFv to the CH2 domain (although in many embodiments the hinge is used as this domain linker). While any suitable linker can be used, many embodiments utilize a glycine-serine polymer as the domain linker, including for example (GS)n, (GSGGS)n (SEQ ID NO: 474), (GGGGS)n (SEQ ID NO: 475), and (GGGS)n (SEQ ID NO: 476), where n is an integer of at least one (and generally from 3 to 4 to 5) as well as any peptide sequence that allows for recombinant attachment of the two domains with sufficient length and flexibility to allow each domain to retain its biological function. In some cases, and with attention being paid to “strandedness”, as outlined below, charged domain linkers, as used in some embodiments of scFv linkers can be used.

[0137] With particular reference to the domain linker used to attach the scFv domain to the Fc domain in the “2+1” format, there are several domain linkers that find particular use, including SEQ ID NO:28, SEQ ID NO:29, SEQ ID NO:30, SEQ ID NO:31.

[0138] In some embodiments, the linker is a “scFv linker”, used to covalently attach the VH and VL domains as discussed herein. In many cases, the scFv linker is a charged scFv linker, a number of which are shown in FIG. 5. Accordingly, the present invention further provides charged scFv linkers, to facilitate the separation in pI between a first and a second monomer. That is, by incorporating a charged scFv linker, either positive or negative (or both, in the case of scaffolds that use scFvs on different monomers), this allows the monomer comprising the charged linker to alter the pI without making further changes in the Fc domains. These charged linkers can be substituted into any scFv containing standard linkers. Again, as will be appreciated by those in the art, charged scFv linkers are used on the correct “strand” or monomer, according to the desired changes in pI. For example, as discussed herein, to make 1+1 Fab-scFv-Fc format heterodimeric antibody, the original pI of the Fv region for each of the desired antigen binding domains are calculated, and one is chosen to make an scFv, and depending on the pI, either positive or negative linkers are chosen.

[0139] Charged domain linkers can also be used to increase the pI separation of the monomers of the invention as well, and thus those included in FIG. 5 can be used in any embodiment herein where a linker is utilized.

[0140] In particular, the formats depicted in FIG. 1 are antibodies, usually referred to as “heterodimeric antibodies”, meaning that the protein has at least two associated Fc sequences self-assembled into a heterodimeric Fc domain and at least two Fv regions, whether as Fabs or as scFvs.

### F. Chimeric and Humanized Antibodies

[0141] In certain embodiments, the antibodies of the invention comprise a heavy chain variable region from a particular germline heavy chain immunoglobulin gene and/or a light chain variable region from a particular germline light chain immunoglobulin gene. For example, such antibodies may comprise or consist of a human antibody comprising heavy or light chain variable regions that are “the product of” or “derived from” a particular germline sequence. A human antibody that is “the product of” or “derived from” a human germline immunoglobulin sequence can be identified as such by comparing the amino acid sequence of the human antibody to the amino acid sequences of human germline immunoglobulins and selecting the human germline immunoglobulin sequence that is closest in sequence (i.e., greatest % identity) to the sequence of the human antibody (using the methods outlined herein). A human antibody that is “the product of” or “derived from” a particular human germline immunoglobulin sequence may contain amino acid differences as compared to the germline sequence, due to, for example, naturally-occurring somatic mutations or intentional introduction of site-directed mutation. However, a humanized antibody typically is at least 90% identical in amino acids sequence to an amino acid sequence encoded by a human germline immunoglobulin gene and contains amino acid residues that identify the antibody as being derived from human sequences when compared to the germline immunoglobulin amino acid sequences of other species (e.g., murine germline sequences). In certain cases, a humanized antibody may be at least 95, 96, 97, 98 or 99%, or even at least 96%, 97%, 98%, or 99% identical in amino acid sequence to the amino acid sequence encoded by the germline immunoglobulin gene. Typically, a humanized antibody derived from a particular human germline sequence will display no more than 10-20 amino acid differences from the amino acid sequence encoded by the human germline immunoglobulin gene (prior to the introduction of any skew, pI and ablation variants herein; that is, the number of variants is generally low, prior to the introduction of the variants of the invention). In certain cases, the humanized antibody may display no more than 5, or even no more than 4, 3, 2, or 1 amino acid difference from the amino acid sequence encoded by the germline immunoglobulin gene (again, prior to the introduction of any skew, pI and ablation variants herein; that is, the number of variants is generally low, prior to the introduction of the variants of the invention).

[0142] In one embodiment, the parent antibody has been affinity matured, as is known in the art. Structure-based methods may be employed for humanization and affinity maturation, for example as described in U.S. Ser. No. 11/004,590. Selection based methods may be employed to humanize and/or affinity mature antibody variable regions, including but not limited to methods described in Wu et al., 1999, J. Mol. Biol. 294:151-162; Baca et al., 1997, J. Biol. Chem. 272(16):10678-10684; Rosok et al., 1996, J. Biol. Chem. 271(37): 22611-22618; Rader et al., 1998, Proc. Natl. Acad. Sci. USA 95: 8910-8915; Krauss et al., 2003, Protein Engineering 16(10):753-759, all entirely incorporated by reference. Other humanization methods may involve the grafting of only parts of the CDRs, including but not limited to methods described in U.S. Ser. No. 09/810,510; Tan et al., 2002, J. Immunol. 169:1119-1125; De Pascalis et al., 2002, J. Immunol. 169:3076-3084, all entirely incorporated by reference.

### G. Heterodimeric Antibodies

[0143] Accordingly, in some embodiments, the subject antibody is a heterodimeric antibody that relies on the use of two different heavy chain variant Fc sequences. Such an antibody will self-assemble to form a heterodimeric Fc domain and heterodimeric antibody.

[0144] The present invention is directed to novel constructs to provide heterodimeric antibodies that allow binding to more than one antigen or ligand, e.g. to allow for bispecific binding (e.g., anti-CLDN18.2 and anti-CD3 binding). The heterodimeric antibody constructs are based on the self-assembling nature of the two Fc domains of the heavy chains of antibodies, e.g. two “monomers” that assemble into a “dimer”. Heterodimeric antibodies are made by altering the amino acid sequence of each monomer as more fully discussed below. Thus, the present invention is generally directed to the creation of heterodimeric antibodies which can co-engage antigens (e.g., CLDN18.2 and CD3) in several ways, relying on amino acid variants in the constant regions that are different on each chain to promote heterodimeric formation and/or allow for ease of purification of heterodimers over the homodimers.

[0145] Thus, the present invention provides bispecific antibodies. In some embodiments, the present invention provides bispecific antibodies that include an CLDN18.2 binding domain. In some embodiments, the bispecific antibody is an anti-CLDN18.2 x anti-CD3 bispecific antibody. An ongoing problem in antibody technologies is the desire for “bispecific” antibodies that bind to two different antigens simultaneously, in general thus allowing the different antigens to be brought into proximity and resulting in new functionalities and new therapies. In general, these antibodies are made by including genes for each heavy and light chain into the host cells. This generally results in the formation of the desired heterodimer (A-B), as well as the two homodimers (A-A and B-B (not including the light chain heterodimeric issues)). However, a major obstacle in the formation of bispecific antibodies is the difficulty in purifying the heterodimeric antibodies away from the homodimeric antibodies and/or biasing the formation of the heterodimer over the formation of the homodimers.

[0146] There are a number of mechanisms that can be used to generate the heterodimers of the present invention. In addition, as will be appreciated by those in the art, these mechanisms can be combined to ensure high heterodimerization. Thus, amino acid variants that lead to the production of heterodimers are referred to as “heterodimerization variants”. As discussed below, heterodimerization variants can include steric variants (e.g. the “knobs and holes” or “skew” variants described below and the “charge pairs” variants described below) as well as “pI variants”, which allows purification of homodimers away from heterodimers. As is generally described in WO2014/145806, hereby incorporated by reference in its entirety and specifically as below for the discussion of “heterodimerization variants”, useful mechanisms for heterodimerization include “knobs and holes” (“KIH”; sometimes herein as “skew” variants (see discussion in WO2014/145806), “electrostatic steering” or “charge pairs” as described in WO2014/145806, pI variants as described in WO2014/145806, and general additional Fc variants as outlined in WO2014/145806 and below.

[0147] In the present invention, there are several basic mechanisms that can lead to ease of purifying heterodimeric antibodies; one relies on the use of pI variants, such that each monomer has a different pI, thus allowing the isoelectric purification of A-A, A-B and B-B dimeric proteins. Alternatively, some scaffold formats, such as the “1+1 Fab-scFv-Fc” format, also allows separation on the basis of size. As is further outlined below, it is also possible to “skew” the formation of heterodimers over homodimers. Thus, a combination of steric heterodimerization variants and pI or charge pair variants find particular use in the invention.

[0148] In general, embodiments of particular use in the present invention rely on sets of variants that include skew variants, which encourage heterodimerization formation over homodimerization formation, coupled with pI variants, which increase the pI difference between the two monomers to facilitate purification of heterodimers away from homodimers.

[0149] Additionally, as more fully outlined below, depending on the format of the heterodimer antibody, pI variants can be either contained within the constant and/or Fc domains of a monomer, or charged linkers, either domain linkers or scFv linkers, can be used. That is, scaffolds that utilize scFv(s) such as the “1+1 Fab-scFv-Fc” format can include charged scFv linkers (either positive or negative), that give a further pI boost for purification purposes. As will be appreciated by those in the art, some 1+1 Fab-scFv-Fc formats are useful with just charged scFv linkers and no additional pI adjustments, although the invention does provide pI variants that are on one or both of the monomers, and/or charged domain linkers as well. In addition, additional amino acid engineering for alternative functionalities may also confer pI changes, such as Fc, FcRn and KO variants.

[0150] In the present invention that utilizes pI as a separation mechanism to allow the purification of heterodimeric proteins, amino acid variants can be introduced into one or both of the monomer polypeptides; that is, the pI of one of the monomers (referred to herein for simplicity as “monomer A”) can be engineered away from monomer B, or both monomer A and B change be changed, with the pI of monomer A increasing and the pI of monomer B decreasing. As is outlined more fully below, the pI changes of either or both monomers can be done by removing or adding a charged residue (e.g. a neutral amino acid is replaced by a positively or negatively charged amino acid residue, e.g. glycine to glutamic acid), changing a charged residue from positive or negative to the opposite charge (aspartic acid to lysine) or changing a charged residue to a neutral residue (e.g. loss of a charge; lysine to serine.). A number of these variants are shown in the Figures.

[0151] Accordingly, this embodiment of the present invention provides for creating a sufficient change in pI in at least one of the monomers such that heterodimers can be separated from homodimers. As will be appreciated by those in the art, and as discussed further below, this can be done by using a “wild type” heavy chain constant region and a variant region that has been engineered to either increase or decrease it's pI (wt A−+B or wt A −−B), or by increasing one region and decreasing the other region (A+−B− or A−B+).

[0152] Thus, in general, a component of some embodiments of the present invention are amino acid variants in the constant regions of antibodies that are directed to altering the isoelectric point (pI) of at least one, if not both, of the monomers of a dimeric protein to form “pI antibodies”) by incorporating amino acid substitutions (“pI variants” or “pI substitutions”) into one or both of the monomers. As shown herein, the separation of the heterodimers from the two homodimers can be accomplished if the pIs of the two monomers differ by as little as 0.1 pH unit, with 0.2, 0.3, 0.4 and 0.5 or greater all finding use in the present invention.

[0153] As will be appreciated by those in the art, the number of pI variants to be included on each or both monomer(s) to get good separation will depend in part on the starting pI of the components, for example in the 1+1 Fab-scFv-Fc format, the starting pI of the scFv and Fab of interest. That is, to determine which monomer to engineer or in which “direction” (e.g. more positive or more negative), the Fv sequences of the two target antigens are calculated and a decision is made from there. As is known in the art, different Fvs will have different starting pIs which are exploited in the present invention. In general, as outlined herein, the pIs are engineered to result in a total pI difference of each monomer of at least about 0.1 logs, with 0.2 to 0.5 being preferred as outlined herein.

[0154] Furthermore, as will be appreciated by those in the art and outlined herein, in some embodiments, heterodimers can be separated from homodimers on the basis of size. As shown in FIG. 1, for example, several of the formats allow separation of heterodimers and homodimers on the basis of size.

[0155] In the case where pI variants are used to achieve heterodimerization, by using the constant region(s) of the heavy chain(s), a more modular approach to designing and purifying bispecific proteins, including antibodies, is provided. Thus, in some embodiments, heterodimerization variants (including skew and purification heterodimerization variants) are not included in the variable regions, such that each individual antibody must be engineered. In addition, in some embodiments, the possibility of immunogenicity resulting from the pI variants is significantly reduced by importing pI variants from different IgG isotypes such that pI is changed without introducing significant immunogenicity. Thus, an additional problem to be solved is the elucidation of low pI constant domains with high human sequence content, e.g. the minimization or avoidance of non-human residues at any particular position.

[0156] A side benefit that can occur with this pI engineering is also the extension of serum half-life and increased FcRn binding. That is, as described in U.S. Ser. No. 13/194,904 (incorporated by reference in its entirety), lowering the pI of antibody constant domains (including those found in antibodies and Fc fusions) can lead to longer serum retention in vivo. These pI variants for increased serum half-life also facilitate pI changes for purification.

[0157] In addition, it should be noted that the pI variants of the heterodimerization variants give an additional benefit for the analytics and quality control process of bispecific antibodies, as the ability to either eliminate, minimize and distinguish when homodimers are present is significant. Similarly, the ability to reliably test the reproducibility of the heterodimeric antibody production is important.

### Heterodimerization Variants

[0158] The present invention provides heterodimeric proteins, including heterodimeric antibodies in a variety of formats, which utilize heterodimeric variants to allow for heterodimeric formation and/or purification away from homodimers.

[0159] There are a number of suitable pairs of sets of heterodimerization skew variants. These variants come in “pairs” of “sets”. That is, one set of the pair is incorporated into the first monomer and the other set of the pair is incorporated into the second monomer. It should be noted that these sets do not necessarily behave as “knobs in holes” variants, with a one-to-one correspondence between a residue on one monomer and a residue on the other; that is, these pairs of sets form an interface between the two monomers that encourages heterodimer formation and discourages homodimer formation, allowing the percentage of heterodimers that spontaneously form under biological conditions to be over 90%, rather than the expected 50% (25% homodimer A/A:50% heterodimer A/B:25% homodimer B/B).

### Steric Variants

[0160] In some embodiments, the formation of heterodimers can be facilitated by the addition of steric variants. That is, by changing amino acids in each heavy chain, different heavy chains are more likely to associate to form the heterodimeric structure than to form homodimers with the same Fc amino acid sequences. Suitable steric variants are included in FIG. 1.

[0161] One mechanism is generally referred to in the art as “knobs and holes”, referring to amino acid engineering that creates steric influences to favor heterodimeric formation and disfavor homodimeric formation can also optionally be used; this is sometimes referred to as “knobs and holes”, as described in U.S. Ser. No. 61/596,846, Ridgway et al., Protein Engineering 9(7):617 (1996); Atwell et al., J. Mol. Biol. 1997 270:26; U.S. Pat. No. 8,216,805, all of which are hereby incorporated by reference in their entirety. The Figures identify a number of “monomer A-monomer B” pairs that rely on “knobs and holes”. In addition, as described in Merchant et al., Nature Biotech. 16:677 (1998), these “knobs and hole” mutations can be combined with disulfide bonds to skew formation to heterodimerization.

[0162] An additional mechanism that finds use in the generation of heterodimers is sometimes referred to as “electrostatic steering” as described in Gunasekaran et al., J. Biol. Chem. 285(25):19637 (2010), hereby incorporated by reference in its entirety. This is sometimes referred to herein as “charge pairs”. In this embodiment, electrostatics are used to skew the formation towards heterodimerization. As those in the art will appreciate, these may also have an effect on pI, and thus on purification, and thus could in some cases also be considered pI variants. However, as these were generated to force heterodimerization and were not used as purification tools, they are classified as “steric variants”. These include, but are not limited to, D221E/P228E/L368E paired with D221R/P228R/K409R (e.g. these are “monomer corresponding sets) and C220E/P228E/368E paired with C220R/E224R/P228R/K409R.

[0163] Additional monomer A and monomer B variants that can be combined with other variants, optionally and independently in any amount, such as pI variants outlined herein or other steric variants that are shown in FIG. 37 of US 2012/0149876, the figure and legend and SEQ ID NOs of which are incorporated expressly by reference herein.

[0164] In some embodiments, the steric variants outlined herein can be optionally and independently incorporated with any pI variant (or other variants such as Fc variants, FcRn variants, etc.) into one or both monomers, and can be independently and optionally included or excluded from the proteins of the invention.

[0165] A list of suitable skew variants is found in FIG. 1, with FIG. 4 showing some pairs of particular utility in many embodiments. Of particular use in many embodiments are the pairs of sets including, but not limited to, S364K/E357Q:L368D/K370S; L368D/K370S:S364K; L368E/K370S:S364K; T411T/E360E/Q362E:D401K; L368D/K370S:S364K/E357L and K370S:S364K/E357Q. In terms of nomenclature, the pair “S364K/E357Q:L368D/K370S” means that one of the monomers has the double variant set S364K/E357Q and the other has the double variant set L368D/K370S.

### pI (Isoelectric Point) Variants for Heterodimers

[0166] In general, as will be appreciated by those in the art, there are two general categories of pI variants: those that increase the pI of the protein (basic changes) and those that decrease the pI of the protein (acidic changes). As described herein, all combinations of these variants can be done: one monomer may be wild type, or a variant that does not display a significantly different pI from wild-type, and the other can be either more basic or more acidic. Alternatively, each monomer is changed, one to more basic and one to more acidic.

[0167] Preferred combinations of pI variants are shown in FIGS. 1 and 2. As outlined herein and shown in the figures, these changes are shown relative to IgG1, but all isotypes can be altered this way, as well as isotype hybrids. In the case where the heavy chain constant domain is from IgG2-4, R133E and R133Q can also be used.

[0168] In one embodiment, for example in the FIG. 42A, E, F, G, H and I formats, a preferred combination of pI variants has one monomer (the negative Fab side) comprising 208D/295E/384D/418E/421D variants (N208D/Q295E/N384D/Q418E/N421D when relative to human IgG1) and a second monomer (the positive scFv side) comprising a positively charged scFv linker, including (GKPGS)₄ (SEQ ID NO: 10). However, as will be appreciated by those in the art, the first monomer includes a CH1 domain, including position 208. Accordingly, in constructs that do not include a CH1 domain (for example for antibodies that do not utilize a CH1 domain on one of the domains, for example in a dual scFv format or a “one armed” format such as those depicted in FIG. 42B, C or D), a preferred negative pI variant Fc set includes 295E/384D/418E/421D variants (Q295E/N384D/Q418E/N421D when relative to human IgG1).

[0169] Accordingly, in some embodiments, one monomer has a set of substitutions from FIG. 2 and the other monomer has a charged linker (either in the form of a charged scFv linker because that monomer comprises an scFv or a charged domain linker, as the format dictates, which can be selected from those depicted in FIG. 5).

### Isotypic Variants

[0170] In addition, many embodiments of the invention rely on the “importation” of pI amino acids at particular positions from one IgG isotype into another, thus reducing or eliminating the possibility of unwanted immunogenicity being introduced into the variants. A number of these are shown in FIG. 21 of US Publ. 2014/0370013, hereby incorporated by reference. That is, IgG1 is a common isotype for therapeutic antibodies for a variety of reasons, including high effector function. However, the heavy constant region of IgG1 has a higher pI than that of IgG2 (8.10 versus 7.31). By introducing IgG2 residues at particular positions into the IgG1 backbone, the pI of the resulting monomer is lowered (or increased) and additionally exhibits longer serum half-life. For example, IgG1 has a glycine (pI 5.97) at position 137, and IgG2 has a glutamic acid (pI 3.22); importing the glutamic acid will affect the pI of the resulting protein. As is described below, a number of amino acid substitutions are generally required to significant affect the pI of the variant antibody. However, it should be noted as discussed below that even changes in IgG2 molecules allow for increased serum half-life.

[0171] In other embodiments, non-isotypic amino acid changes are made, either to reduce the overall charge state of the resulting protein (e.g. by changing a higher pI amino acid to a lower pI amino acid), or to allow accommodations in structure for stability, etc. as is more further described below.

[0172] In addition, by pI engineering both the heavy and light constant domains, significant changes in each monomer of the heterodimer can be seen. As discussed herein, having the pIs of the two monomers differ by at least 0.5 can allow separation by ion exchange chromatography or isoelectric focusing, or other methods sensitive to isoelectric point.

### Calculating pI

[0173] The pI of each monomer can depend on the pI of the variant heavy chain constant domain and the pI of the total monomer, including the variant heavy chain constant domain and the fusion partner. Thus, in some embodiments, the change in pI is calculated on the basis of the variant heavy chain constant domain, using the chart in the FIG. 19 of US Pub. 2014/0370013. As discussed herein, which monomer to engineer is generally decided by the inherent pI of the Fv and scaffold regions. Alternatively, the pI of each monomer can be compared.

### pI Variants That Also Confer Better FcRn In Vivo Binding

[0174] In the case where the pI variant decreases the pI of the monomer, they can have the added benefit of improving serum retention in vivo.

[0175] Although still under examination, Fc regions are believed to have longer half-lives in vivo, because binding to FcRn at pH 6 in an endosome sequesters the Fc (Ghetie and Ward, 1997 Immunol Today. 18(12): 592-598, entirely incorporated by reference). The endosomal compartment then recycles the Fc to the cell surface. Once the compartment opens to the extracellular space, the higher pH, ˜7.4, induces the release of Fc back into the blood. In mice, Dall' Acqua et al. showed that Fc mutants with increased FcRn binding at pH 6 and pH 7.4 actually had reduced serum concentrations and the same half-life as wild-type Fc (Dall' Acqua et al. 2002, J. Immunol. 169:5171-5180, entirely incorporated by reference). The increased affinity of Fc for FcRn at pH 7.4 is thought to forbid the release of the Fc back into the blood. Therefore, the Fc mutations that will increase Fc's half-life in vivo will ideally increase FcRn binding at the lower pH while still allowing release of Fc at higher pH. The amino acid histidine changes its charge state in the pH range of 6.0 to 7.4. Therefore, it is not surprising to find His residues at important positions in the Fc/FcRn complex.

[0176] Recently it has been suggested that antibodies with variable regions that have lower isoelectric points may also have longer serum half-lives (Igawa et al., 2010 PEDS. 23(5): 385-392, entirely incorporated by reference). However, the mechanism of this is still poorly understood. Moreover, variable regions differ from antibody to antibody. Constant region variants with reduced pI and extended half-life would provide a more modular approach to improving the pharmacokinetic properties of antibodies, as described herein.

### Additional Fc Variants for Additional Functionality

[0177] In addition to pI amino acid variants, there are a number of useful Fc amino acid modification that can be made for a variety of reasons, including, but not limited to, altering binding to one or more FcγR receptors, altered binding to FcRn receptors, etc.

[0178] Accordingly, the proteins of the invention can include amino acid modifications, including the heterodimerization variants outlined herein, which includes the pI variants and steric variants. Each set of variants can be independently and optionally included or excluded from any particular heterodimeric protein.

[0179] FcγR Variants

[0180] Accordingly, there are a number of useful Fc substitutions that can be made to alter binding to one or more of the FcγR receptors. Substitutions that result in increased binding as well as decreased binding can be useful. For example, it is known that increased binding to FcγRIIIa generally results in increased ADCC (antibody dependent cell-mediated cytotoxicity; the cell-mediated reaction wherein nonspecific cytotoxic cells that express FcγRs recognize bound antibody on a target cell and subsequently cause lysis of the target cell). Similarly, decreased binding to FcγRIIb (an inhibitory receptor) can be beneficial as well in some circumstances. Amino acid substitutions that find use in the present invention include those listed in U.S. Ser. Nos. 11/124,620 (particularly FIG. 41), 11/174,287, 11/396,495, 11/538,406, all of which are expressly incorporated herein by reference in their entirety and specifically for the variants disclosed therein. Particular variants that find use include, but are not limited to, 236A, 239D, 239E, 332E, 332D, 239D/332E, 267D, 267E, 328F, 267E/328F, 236A/332E, 239D/332E/330Y, 239D/332E/330L, 243A, 243L, 264A, 264V and 299T.

[0181] In addition, there are additional Fc substitutions that find use in increased binding to the FcRn receptor and increased serum half-life, as specifically disclosed in U.S. Ser. No. 12/341,769, hereby incorporated by reference in its entirety, including, but not limited to, 434S, 434A, 428L, 308F, 2591, 428L/434S, 2591/308F, 4361/428L, 4361 or V/434S, 436V/428L and 2591/308F/428L.

### Ablation Variants

[0182] Similarly, another category of functional variants are “FcγR ablation variants” or “Fc knock out (FcKO or KO)” variants. In these embodiments, for some therapeutic applications, it is desirable to reduce or remove the normal binding of the Fc domain to one or more or all of the Fcγ receptors (e.g. FcγR1, FcγRIIa, FcγRIIb, FcγRIIIa, etc.) to avoid additional mechanisms of action. That is, for example, in many embodiments, particularly in the use of bispecific antibodies that bind CD3 monovalently it is generally desirable to ablate FcγRIIIa binding to eliminate or significantly reduce ADCC activity. wherein one of the Fc domains comprises one or more Fcγ receptor ablation variants. These ablation variants are depicted in FIG. 3, and each can be independently and optionally included or excluded, with preferred aspects utilizing ablation variants selected from the group consisting of G236R/L328R, E233P/L234V/L235A/G236del/S239K, E233P/L234V/L235A/G236del/S267K, E233P/L234V/L235A/G236del/S239K/A327G, E233P/L234V/L235A/G236del/S267K/A327G and E233P/L234V/L235A/G236del. It should be noted that the ablation variants referenced herein ablate FcγR binding but generally not FcRn binding.

[0183] As is known in the art, the Fc domain of human IgG1 has the highest binding to the Fcγ receptors, and thus ablation variants can be used when the constant domain (or Fc domain) in the backbone of the heterodimeric antibody is IgG1. Alternatively, or in addition to ablation variants in an IgG1 background, mutations at the glycosylation position 297 (generally to A or S) can significantly ablate binding to FcγRIIIa, for example. Human IgG2 and IgG4 have naturally reduced binding to the Fcγ receptors, and thus those backbones can be used with or without the ablation variants.

### Combination of Heterodimeric and Fc Variants

[0184] As will be appreciated by those in the art, all of the recited heterodimerization variants (including skew and/or pI variants) can be optionally and independently combined in any way, as long as they retain their “strandedness” or “monomer partition”. In addition, all of these variants can be combined into any of the heterodimerization formats.

[0185] In the case of pI variants, while embodiments finding particular use are shown in the Figures, other combinations can be generated, following the basic rule of altering the pI difference between two monomers to facilitate purification.

[0186] In addition, any of the heterodimerization variants, skew and pI, are also independently and optionally combined with Fc ablation variants, Fc variants, FcRn variants, as generally outlined herein.

### H. Useful Formats of the Invention

[0187] As will be appreciated by those in the art and discussed more fully below, the heterodimeric fusion proteins of the present invention can take on a wide variety of configurations, as are generally depicted in FIGS. 13 and 42. Some figures depict “single ended” configurations, where there is one type of specificity on one “arm” of the molecule and a different specificity on the other “arm”. Other figures depict “dual ended” configurations, where there is at least one type of specificity at the “top” of the molecule and one or more different specificities at the “bottom” of the molecule. Thus, the present invention is directed to novel immunoglobulin compositions that co-engage a different first and a second antigen.

[0188] As will be appreciated by those in the art, the heterodimeric formats of the invention can have different valencies as well as be bispecific. That is, heterodimeric antibodies of the invention can be bivalent and bispecific, wherein one target tumor antigen (e.g. CD3) is bound by one binding domain and the other target tumor antigen (e.g. CLDN18.2) is bound by a second binding domain. The heterodimeric antibodies can also be trivalent and bispecific, wherein the first antigen is bound by two binding domains and the second antigen by a second binding domain. As is outlined herein, when CD3 is one of the target antigens, it is preferable that the CD3 is bound only monovalently, to reduce potential side effects.

[0189] The present invention utilizes anti-CD3 antigen binding domains in combination with anti-CLDN18.2 binding domains. As will be appreciated by those in the art, any collection of anti-CD3 CDRs, anti-CD3 variable light and variable heavy domains, Fabs and scFvs as depicted in any of the Figures can be used. Similarly, any of the anti-CLDN18.2 antigen binding domains can be used, whether CDRs, variable light and variable heavy domains, Fabs and scFvs as depicted in any of the Figures (e.g., FIGS. 8 and 10) can be used, optionally and independently combined in any combination.

### 1+1 Fab-scFv-Fc Format

[0190] One heterodimeric scaffold that finds particular use in the present invention is the “1+1 Fab-scFv-Fc” format of FIG. 13A and FIG. 42A. In this embodiment, one heavy chain of the antibody contains an single chain Fv (“scFv”, as defined below) and the other heavy chain is a “regular” Fab format, comprising a variable heavy chain and a light chain. This structure is sometimes referred to in previous related filings as “triple F” format (scFv-Fab-Fc) or the “bottle-opener” format, due to a rough visual similarity to a bottle-opener. The two chains are brought together by the use of amino acid variants in the constant regions (e.g., the Fc domain, the CH1 domain and/or the hinge region) that promote the formation of heterodimeric antibodies as is described more fully below.

[0191] There are several distinct advantages to the present “1+1 Fab-scFv-Fc” format. As is known in the art, antibody analogs relying on two scFv constructs often have stability and aggregation problems, which can be alleviated in the present invention by the addition of a “regular” heavy and light chain pairing. In addition, as opposed to formats that rely on two heavy chains and two light chains, there is no issue with the incorrect pairing of heavy and light chains (e.g. heavy 1 pairing with light 2, etc.).

[0192] Many of the embodiments outlined herein rely in general on the bottle opener format that comprises a first monomer comprising an scFv, comprising a variable heavy and a variable light domain, covalently attached using an scFv linker (charged, in many but not all instances), where the scFv is covalently attached to the N-terminus of a first Fc domain usually through a domain linker (which, as outlined herein can either be un-charged or charged). The second monomer of the bottle opener format is a heavy chain, and the composition further comprises a light chain.

[0193] In general, in many preferred embodiments, the scFv is the domain that binds to the CD3, and the Fab forms a CLDN18.2 binding domain.

[0194] In addition, the Fc domains of the invention generally comprise skew variants (e.g. a set of amino acid substitutions as shown in FIGS. 1 and 4, with particularly useful skew variants being selected from the group consisting of S364K/E357Q:L368D/K370S; L368D/K370S:S364K; L368E/K370S:S364K; T411T/E360E/Q362E:D401K; L368D/K370S:S364K/E357L and K370S:S364K/E357Q), optionally ablation variants (including those shown in FIG. 3), optionally charged scFv linkers (including those shown in FIG. 5) and the heavy chain comprises pI variants (including those shown in FIG. 2).

[0195] In some embodiments, the bottle opener format includes skew variants, pI variants, and ablation variants. Accordingly, some embodiments include bottle opener formats that comprise: a) a first monomer (the “scFv monomer”) that comprises a charged scFv linker (with the +H sequence of FIG. 5 being preferred in some embodiments), the skew variants S364K/E357Q, the ablation variants E233P/L234V/L235A/G236del/S267K, and an Fv that binds to CD3 as outlined herein; b) a second monomer (the “Fab monomer”) that comprises the skew variants L368D/K370S, the pI variants N208D/Q295E/N384D/Q418E/N421D, the ablation variants E233P/L234V/L235A/G236del/S267K, and a variable heavy domain that, with the variable light domain, makes up an Fv that binds to CLDN18.2 as outlined herein; and c) a light chain.

[0196] Exemplary variable heavy and light domains of the scFv that binds to CD3 are included in FIG. 12. Exemplary variable heavy and light domains of the Fv that binds to CLDN18.2 are included in FIG. 10.

[0197] In some embodiments, the bottle opener format includes skew variants, pI variants, ablation variants and FcRn variants. Accordingly, some embodiments include bottle opener formats that comprise: a) a first monomer (the “scFv monomer”) that comprises a charged scFv linker (with the +H sequence of FIG. 2 being preferred in some embodiments), the skew variants S364K/E357Q, the ablation variants E233P/L234V/L235A/G236del/S267K, the FcRn variants M428L/N434S and an Fv that binds to CD3 as outlined herein; b) a second monomer (the “Fab monomer”) that comprises the skew variants L368D/K370S, the pI variants N208D/Q295E/N384D/Q418E/N421D, the ablation variants E233P/L234V/L235A/G236del/S267K, the FcRn variants M428L/N434S, and a variable heavy domain that, with the variable light domain, makes up an Fv that binds to CLDN18.2 as outlined herein; and c) a light chain.

[0198] Exemplary variable heavy and light domains of scFvs that bind to CD3 are included in FIG. 12. Exemplary variable heavy and light domains of the Fv that binds to CLDN18.2 are included in FIG. 10.

[0199] FIG. 6 shows some exemplary bottle opener “backbone” sequences that are missing the Fv sequences that can be used in the present invention. In some embodiments, any of the VH and VL sequences depicted herein (including all VH and VL sequences depicted in the Figures and Sequence Listings, including those directed to CLDN18.2) can be added to the bottle opener backbone formats of FIG. 6 as the “Fab side”, using any of the anti-CD3 scFv sequences shown in the Figures and Sequence Listings.

[0200] For bottle opener backbone 1 from FIG. 6, (optionally including the 428L/434S variants), CD binding domain sequences finding particular use in these embodiments include, but are not limited to, CD3 binding domain anti-CD3 H1.30_L1.47, anti-CD3 H1.32_L1.47, anti-CD3 H1.89_L1.47, anti-CD3 H1.90_L1.47, anti-CD3 H1.33_L1.47 and anti-CD3 H1.31_L1.47, as well as those depicted in FIG. 12, attached as the scFv side of the backbones shown in FIG. 6.

[0201] Particularly useful CLDN18.2 and CD3 sequence combinations for use with bottle opener backbone 1 from FIG. 6, (optionally including the 428L/434S variants), are disclosed in FIG. 31.

mAb-Fv

[0202] One heterodimeric scaffold that finds particular use in the present invention is the mAb-Fv format shown in FIG. 42G. In this embodiment, the format relies on the use of a C-terminal attachment of an “extra” variable heavy domain to one monomer and the C-terminal attachment of an “extra” variable light domain to the other monomer, thus forming a third antigen binding domain, wherein the Fab portions of the two monomers bind a CLDN18.2 and the “extra” scFv domain binds CD3.

[0203] In this embodiment, the first monomer comprises a first heavy chain, comprising a first variable heavy domain and a first constant heavy domain comprising a first Fc domain, with a first variable light domain covalently attached to the C-terminus of the first Fc domain using a domain linker (VH1-CH1-hinge-CH2-CH3-[optional linker]-VL2). The second monomer comprises a second variable heavy domain of the second constant heavy domain comprising a second Fc domain, and a third variable heavy domain covalently attached to the C-terminus of the second Fc domain using a domain linker (VH1-CH1-hinge-CH2-CH3-[optional linker]-VH2. The two C-terminally attached variable domains make up a Fv that binds CD3 (as it is less preferred to have bivalent CD3 binding). This embodiment further utilizes a common light chain comprising a variable light domain and a constant light domain that associates with the heavy chains to form two identical Fabs that bind a CLDN18.2. As for many of the embodiments herein, these constructs include skew variants, pI variants, ablation variants, additional Fc variants, etc. as desired and described herein.

[0204] The present invention provides mAb-Fv formats where the CD3 binding domain sequences are as shown in FIG. 12. The present invention provides mAb-Fv formats wherein the CLDN18.2 binding domain sequences are as shown in FIG. 10.

[0205] In addition, the Fc domains of the mAb-Fv format comprise skew variants (e.g. a set of amino acid substitutions as shown in FIGS. 1 and 4, with particularly useful skew variants being selected from the group consisting of S364K/E357Q:L368D/K370S; L368D/K370S:S364K; L368E/K370S:S364K; T411T/E360E/Q362E:D401K; L368D/K370S:S364K/E357L, K370S:S364K/E357Q, T366S/L368A/Y407V:T366W and T366S/L368A/Y407V/Y349C:T366W/S354C), optionally ablation variants (including those shown in FIG. 3), optionally charged scFv linkers (including those shown in FIG. 5) and the heavy chain comprises pI variants (including those shown in FIG. 2).

[0206] In some embodiments, the mAb-Fv format includes skew variants, pI variants, and ablation variants. Accordingly, some embodiments include mAb-Fv formats that comprise: a) a first monomer that comprises the skew variants S364K/E357Q, the ablation variants E233P/L234V/L235A/G236del/S267K, and a first variable heavy domain that, with the first variable light domain of the light chain, makes up an Fv that binds to CLDN18.2, and a second variable heavy domain; b) a second monomer that comprises the skew variants L368D/K370S, the pI variants N208D/Q295E/N384D/ Q418E/N421D, the ablation variants E233P/L234V/L235A/G236del/S267K, and a first variable heavy domain that, with the first variable light domain, makes up the Fv that binds to CLDN18.2 as outlined herein, and a second variable light chain, that together with the second variable heavy domain forms an Fv (ABD) that binds to CD3; and c) a light chain comprising a first variable light domain and a constant light domain.

[0207] In some embodiments, the mAb-Fv format includes skew variants, pI variants, ablation variants and FcRn variants. Accordingly, some embodiments include mAb-Fv formats that comprise: a) a first monomer that comprises the skew variants S364K/E357Q, the ablation variants E233P/L234V/L235A/G236del/S267K, the FcRn variants M428L/N434S and a first variable heavy domain that, with the first variable light domain of the light chain, makes up an Fv that binds to CLDN18.2, and a second variable heavy domain; b) a second monomer that comprises the skew variants L368D/K370S, the pI variants N208D/Q295E/N384D/Q418E/N421D, the ablation variants E233P/L234V/L235A/G236del/S267K, the FcRn variants M428L/N434S and a first variable heavy domain that, with the first variable light domain, makes up the Fv that binds to CLDN18.2 as outlined herein, and a second variable light chain, that together with the second variable heavy domain of the first monomer forms an Fv (ABD) that binds CD3; and c) a light chain comprising a first variable light domain and a constant light domain.

mAb-scFv

[0208] One heterodimeric scaffold that finds particular use in the present invention is the mAb-scFv format shown in FIG. 42H. In this embodiment, the format relies on the use of a C-terminal attachment of a scFv to one of the monomers, thus forming a third antigen binding domain, wherein the Fab portions of the two monomers bind CLDN18.2 and the “extra” scFv domain binds CD3. Thus, the first monomer comprises a first heavy chain (comprising a variable heavy domain and a constant domain), with a C-terminally covalently attached scFv comprising a scFv variable light domain, an scFv linker and a scFv variable heavy domain in either orientation (VH1-CH1-hinge-CH2-CH3-[optional linker]-VH2-scFv linker-VL2 or VH1-CH1-hinge-CH2-CH3-[optional linker]-VL2-scFv linker-VH2). This embodiment further utilizes a common light chain comprising a variable light domain and a constant light domain, that associates with the heavy chains to form two identical Fabs that bind CLDN18.2. As for many of the embodiments herein, these constructs include skew variants, pI variants, ablation variants, additional Fc variants, etc. as desired and described herein.

[0209] The present invention provides mAb-scFv formats where the CD binding domain sequences are as shown in FIG. 12 and the CLDN18.2 binding domain sequences are as shown in FIG. 10.

[0210] In addition, the Fc domains of the mAb-scFv format comprise skew variants (e.g. a set of amino acid substitutions as shown in FIG. 1, with particularly useful skew variants being selected from the group consisting of S364K/E357Q:L368D/K370S; L368D/K370S:S364K; L368E/K370S:S364K; T411T/E360E/Q362E:D401K; L368D/K370S:S364K/E357L, K370S:S364K/E357Q, T366S/L368A/Y407V:T366W and T366S/L368A/Y407V/Y349C:T366W/S354C), optionally ablation variants (including those shown in FIG. 3), optionally charged scFv linkers (including those shown in FIG. 5) and the heavy chain comprises pI variants (including those shown in FIG. 2).

[0211] In some embodiments, the mAb-scFv format includes skew variants, pI variants, and ablation variants. Accordingly, some embodiments include mAb-scFv formats that comprise: a) a first monomer that comprises the skew variants S364K/E357Q, the ablation variants E233P/L234V/L235A/G236del/S267K, and a variable heavy domain that, with the variable light domain of the common light chain, makes up an Fv that binds to CLDN18.2 as outlined herein, and a scFv domain that binds to CD3; b) a second monomer that comprises the skew variants L368D/K370S, the pI variants N208D/Q295E/N384D/Q418E/N421D, the ablation variants E233P/L234V/L235A/G236del/S267K, and a variable heavy domain that, with the variable light domain of the common light chain, makes up an Fv that binds to CLDN18.2 as outlined herein; and c) a common light chain comprising a variable light domain and a constant light domain.

[0212] In some embodiments, the mAb-scFv format includes skew variants, pI variants, ablation variants and FcRn variants. Accordingly, some embodiments include mAb-scFv formats that comprise: a) a first monomer that comprises the skew variants S364K/E357Q, the ablation variants E233P/L234V/L235A/G236del/S267K, the FcRn variants M428L/N434S and a variable heavy domain that, with the variable light domain of the common light chain, makes up an Fv that binds to CLDN18.2 as outlined herein, and a scFv domain that binds to CD3; b) a second monomer that comprises the skew variants L368D/K370S, the pI variants N208D/Q295E/N384D/Q418E/N421D, the ablation variants E233P/L234V/L235A/G236del/S267K, the FcRn variants M428L/N434S and a variable heavy domain that, with the variable light domain of the common light chain, makes up an Fv that binds to CLDN18.2 as outlined herein; and c) a common light chain comprising a variable light domain and a constant light domain.

### 2+1 Fab₂-scFv-Fc Format

[0213] One heterodimeric scaffold that finds particular use in the present invention is the “2+1 Fab₂-scFv-Fc” format (also referred to in previous related filings as “Central-scFv format”) shown in FIG. 13B and FIG. 42F. In this embodiment, the format relies on the use of an inserted scFv domain thus forming a third antigen binding domain, wherein the Fab portions of the two monomers bind CLDN18.2 and the “extra” scFv domain binds CD3. The scFv domain is inserted between the Fc domain and the CH1-Fv region of one of the monomers, thus providing a third antigen binding domain.

[0214] In this embodiment, one monomer comprises a first heavy chain comprising a first variable heavy domain, a CH1 domain (and optional hinge) and Fc domain, with a scFv comprising a scFv variable light domain, an scFv linker and a scFv variable heavy domain. The scFv is covalently attached between the C-terminus of the CH1 domain of the heavy constant domain and the N-terminus of the first Fc domain using optional domain linkers (VH1-CH1-[optional linker]-VH2-scFv linker-VL2-[optional linker including the hinge]-CH2-CH3, or the opposite orientation for the scFv, VH1-CH1-[optional linker]-VL2-scFv linker-VH2-[optional linker including the hinge]-CH2-CH3). The other monomer is a standard Fab side. This embodiment further utilizes a common light chain comprising a variable light domain and a constant light domain, that associates with the heavy chains to form two identical Fabs that bind CLDN18.2. As for many of the embodiments herein, these constructs include skew variants, pI variants, ablation variants, additional Fc variants, etc. as desired and described herein.

[0215] The present invention provides “2+1 Fab₂-scFv-Fc” formats where the CD3 binding domain sequences are as shown in FIG. 12 and the anti-CLDN18.2 sequences are as shown in FIG. 10.

[0216] In addition, the Fc domains of the central scFv format comprise skew variants (e.g. a set of amino acid substitutions as shown in FIG. 1, with particularly useful skew variants being selected from the group consisting of S364K/E357Q:L368D/K370S; L368D/K370S:S364K; L368E/K370S:S364K; T411T/E360E/Q362E:D401K; L368D/K370S:S364K/E357L, K370S:S364K/E357Q, T366S/L368A/Y407V:T366W and T366S/L368A/Y407V/Y349C:T366W/S354C), optionally ablation variants (including those shown in FIG. 3), optionally charged scFv linkers (including those shown in FIG. 5) and the heavy chain comprises pI variants (including those shown in FIG. 2).

[0217] In some embodiments, the central-scFv format includes skew variants, pI variants, and ablation variants. Accordingly, some embodiments include central scFv formats that comprise: a) a first monomer that comprises the skew variants S364K/E357Q, the ablation variants E233P/L234V/L235A/G236del/S267K, and a variable heavy domain that, with the variable light domain of the light chain, makes up an Fv that binds to CLDN18.2 as outlined herein, and an scFv domain that binds to CD3; b) a second monomer that comprises the skew variants L368D/K370S, the pI variants N208D/Q295E/N384D/Q418E/N421D, the ablation variants E233P/L234V/L235A/G236del/S267K, and a variable heavy domain that, with variable light domain of the light chain, makes up an Fv that binds to CLDN18.2 as outlined herein; and c) a light chain comprising a variable light domain and a constant light domain.

[0218] In some embodiments, the central-scFv format includes skew variants, pI variants, ablation variants and FcRn variants. Accordingly, some embodiments include central scFv formats that comprise: a) a first monomer that comprises the skew variants S364K/E357Q, the ablation variants E233P/L234V/L235A/G236del/S267K, the FcRn variants M428L/N434S and a variable heavy domain that, with the variable light domain of the light chain, makes up an Fv that binds to CLDN18.2 as outlined herein, and an scFv domain that binds to CD3; b) a second monomer that comprises the skew variants L368D/K370S, the pI variants N208D/Q295E/N384D/Q418E/N421D, the ablation variants E233P/L234V/L235A/G236del/S267K, the FcRn variants M428L/N434S and a variable heavy domain that, with variable light domain of the light chain, makes up an Fv that binds to CLDN18.2 as outlined herein; and c) a light chain comprising a variable light domain and a constant light domain.

### Central-Fv

[0219] One heterodimeric scaffold that finds particular use in the present invention is the Central-Fv format shown in FIG. 42I. In this embodiment, the format relies on the use of an inserted Fv domain (i.e., the central Fv domain) thus forming a third antigen binding domain, wherein the Fab portions of the two monomers bind a CLDN18.2 and the “central Fv” domain binds CD3. The scFv domain is inserted between the Fc domain and the CH1-Fv region of the monomers, thus providing a third antigen binding domain, wherein each monomer contains a component of the scFv (e.g. one monomer comprises a variable heavy domain and the other a variable light domain).

[0220] In this embodiment, one monomer comprises a first heavy chain comprising a first variable heavy domain, a CH1 domain, and Fc domain and an additional variable light domain. The light domain is covalently attached between the C-terminus of the CH1 domain of the heavy constant domain and the N-terminus of the first Fc domain using domain linkers (VH1-CH1-[optional linker]-VL2-hinge-CH2-CH3). The other monomer comprises a first heavy chain comprising a first variable heavy domain, a CH1 domain and Fc domain and an additional variable heavy domain (VH1-CH1-[optional linker]-VH2-hinge-CH2-CH3). The light domain is covalently attached between the C-terminus of the CH1 domain of the heavy constant domain and the N-terminus of the first Fc domain using domain linkers.

[0221] This embodiment further utilizes a common light chain comprising a variable light domain and a constant light domain, that associates with the heavy chains to form two identical Fabs that bind a CLDN18.2. As for many of the embodiments herein, these constructs include skew variants, pI variants, ablation variants, additional Fc variants, etc. as desired and described herein.

[0222] The present invention provides central-Fv formats where the CD3 binding domain sequences are as shown in FIG. 12 and the CLDN18.2 binding domain sequences are as shown in FIG. 10.

[0223] For central-Fv formats, CD3 binding domain sequences finding particular use in these embodiments include, but are not limited to, anti-CD3 H1.30_L1.47, anti-CD3 H1.32_L1.47, anti-CD3 H1.89_L1.47, anti-CD3 H1.90_L1.47, anti-CD3 H1.33_L1.47 and anti-CD3 H1.31_L1.47 as depicted in FIG. 12.

### One Armed Central-scFv

[0224] One heterodimeric scaffold that finds particular use in the present invention is the one armed central-scFv format shown in FIG. 42C. In this embodiment, one monomer comprises just an Fc domain, while the other monomer uses an inserted scFv domain thus forming the second antigen binding domain. In this format, either the Fab portion binds a CLDN18.2 and the scFv binds CD3 or vice versa. The scFv domain is inserted between the Fc domain and the CH1-Fv region of one of the monomers.

[0225] In this embodiment, one monomer comprises a first heavy chain comprising a first variable heavy domain, a CH1 domain and Fc domain, with a scFv comprising a scFv variable light domain, an scFv linker and a scFv variable heavy domain. The scFv is covalently attached between the C-terminus of the CH1 domain of the heavy constant domain and the N-terminus of the first Fc domain using domain linkers. The second monomer comprises an Fc domain. This embodiment further utilizes a light chain comprising a variable light domain and a constant light domain, that associates with the heavy chain to form a Fab. As for many of the embodiments herein, these constructs include skew variants, pI variants, ablation variants, additional Fc variants, etc. as desired and described herein.

[0226] The present invention provides central-Fv formats where the CD3 binding domain sequences are as shown in FIG. 12 and the CLDN18.2 binding domain sequences are as shown in FIG. 10.

[0227] In addition, the Fc domains of the one armed central-scFv format generally include skew variants (e.g. a set of amino acid substitutions as shown in FIG. 1, with particularly useful skew variants being selected from the group consisting of S364K/E357Q:L368D/K370S; L368D/K370S:S364K; L368E/K370S:S364K; T411T/E360E/Q362E:D401K; L368D/K370S:S364K/E357L, K370S:S364K/E357Q, T366S/L368A/Y407V:T366W and T366S/L368A/Y407V/Y349C:T366W/S354C), optionally ablation variants (including those shown in FIG. 3), optionally charged scFv linkers (including those shown in FIG. 5) and the heavy chain comprises pI variants (including those shown in FIG. 2).

[0228] In some embodiments, the one armed central-scFv format includes skew variants, pI variants, and ablation variants. Accordingly, some embodiments of the one armed central-scFv formats comprise: a) a first monomer that comprises the skew variants S364K/E357Q, the ablation variants E233P/L234V/L235A/G236del/S267K, and a variable heavy domain that, with the variable light domain of the light chain, makes up an Fv that binds to CLDN18.2 as outlined herein, and a scFv domain that binds to CD3; b) a second monomer that includes an Fc domain having the skew variants L368D/K370S, the pI variants N208D/Q295E/N384D/ Q418E/N421D, the ablation variants E233P/L234V/L235A/G236del/S267K; and c) a light chain comprising a variable light domain and a constant light domain.

[0229] In some embodiments, the one armed central-scFv format includes skew variants, pI variants, ablation variants and FcRn variants. Accordingly, some embodiments of the one armed central-scFv formats comprise: a) a first monomer that comprises the skew variants S364K/E357Q, the ablation variants E233P/L234V/L235A/G236del/S267K, the FcRn variants M428L/N434S and a variable heavy domain that, with the variable light domain of the light chain, makes up an Fv that binds to CLDN18.2 as outlined herein, and a scFv domain that binds to CD3; b) a second monomer that includes an Fc domain having the skew variants L368D/K370S, the pI variants N208D/Q295E/N384D/Q418E/N421D, the ablation variants E233P/L234V/L235A/G236del/S267K, and the FcRn variants M428L/N434S; and c) a light chain comprising a variable light domain and a constant light domain.

[0230] For one armed central-scFv formats, CD3 binding domain sequences finding particular use include, but are not limited to, anti-CD3 H1.30_L1.47, anti-CD3 H1.32_L1.47, anti-CD3 H1.89_L1.47, anti-CD3 H1.90_L1.47, anti-CD3 H1.33_L1.47 and anti-CD3 H1.31_L1.47, as depicted in FIG. 12.

One Armed scFv-mAb

[0231] One heterodimeric scaffold that finds particular use in the present invention is the one armed scFv-mAb format shown in FIG. 42D. In this embodiment, one monomer comprises just an Fc domain, while the other monomer uses a scFv domain attached at the N-terminus of the heavy chain, generally through the use of a linker: VH-scFv linker-VL-[optional domain linker]-CH1-hinge-CH2-CH3 or (in the opposite orientation) VL-scFv linker-VH-[optional domain linker]-CH1-hinge-CH2-CH3. In this format, the Fab portions each bind CLDN18.2 and the scFv binds CD3. This embodiment further utilizes a light chain comprising a variable light domain and a constant light domain, that associates with the heavy chain to form a Fab. As for many of the embodiments herein, these constructs include skew variants, pI variants, ablation variants, additional Fc variants, etc. as desired and described herein.

[0232] The present invention provides one armed scFv-mAb formats where the CD3 binding domain sequences are as shown in FIG. 12 and wherein the CLDN18.2 binding domain sequences are as shown in FIG. 10.

[0233] In addition, the Fc domains of the one armed scFv-mAb format generally include skew variants (e.g. a set of amino acid substitutions as shown in FIGS. 1 and 4, with particularly useful skew variants being selected from the group consisting of S364K/E357Q:L368D/K370S; L368D/K370S:S364K; L368E/K370S:S364K; T411T/E360E/Q362E:D401K; L368D/K370S:S364K/E357L, K370S:S364K/E357Q, T366S/L368A/Y407V:T366W and T366S/L368A/Y407V/Y349C:T366W/S354C), optionally ablation variants (including those shown in FIG. 3), optionally charged scFv linkers (including those shown in FIG. 5) and the heavy chain comprises pI variants (including those shown in FIG. 2).

[0234] In some embodiments, the one armed scFv-mAb format includes skew variants, pI variants, and ablation variants. Accordingly, some embodiments of the one armed scFv-mAb formats comprise: a) a first monomer that comprises the skew variants S364K/E357Q, the ablation variants E233P/L234V/L235A/G236del/S267K, and a variable heavy domain that, with the variable light domain of the light chain, makes up an Fv that binds to CLDN18.2 as outlined herein, and a scFv domain that binds to CD3; b) a second monomer that includes an Fc domain having the skew variants L368D/K370S, the pI variants N208D/Q295E/N384D/Q418E/N421D, the ablation variants E233P/L234V/L235A/G236del/S267K; and c) a light chain comprising a variable light domain and a constant light domain.

[0235] In some embodiments, the one armed scFv-mAb format includes skew variants, pI variants, ablation variants and FcRn variants. Accordingly, some embodiments one armed scFv-mAb formats comprise: a) a first monomer that comprises the skew variants S364K/E357Q, the ablation variants E233P/L234V/L235A/G236del/S267K, the FcRn variants M428L/N434S and a variable heavy domain that, with the variable light domain of the light chain, makes up an Fv that binds to CLDN18.2 as outlined herein, and a scFv domain that binds to CD3; b) a second monomer that includes an Fc domain having the skew variants L368D/K370S, the pI variants N208D/Q295E/N384D/Q418E/N421D, the ablation variants E233P/L234V/L235A/G236del/S267K, and the FcRn variants M428L/N434S; and c) a light chain comprising a variable light domain and a constant light domain.

[0236] For one armed scFv-mAb formats, CD3 binding domain sequences finding particular use include, but are not limited to, anti-CD3 H1.30_L1.47, anti-CD3 H1.32_L1.47, anti-CD3 H1.89_L1.47, anti-CD3 H1.90_L1.47, anti-CD3 H1.33_L1.47 and anti-CD3 H1.31_L1.47, as depicted in FIG. 12.

scFv-mAb

[0237] One heterodimeric scaffold that finds particular use in the present invention is the mAb-scFv format shown in FIG. 42E. In this embodiment, the format relies on the use of a N-terminal attachment of a scFv to one of the monomers, thus forming a third antigen binding domain, wherein the Fab portions of the two monomers bind CLDN18.2 and the “extra” scFv domain binds CD3.

[0238] In this embodiment, the first monomer comprises a first heavy chain (comprising a variable heavy domain and a constant domain), with a N-terminally covalently attached scFv comprising a scFv variable light domain, an scFv linker and a scFv variable heavy domain in either orientation ((VH1-scFv linker-VL1-[optional domain linker]-VH2-CH1-hinge-CH2-CH3) or (with the scFv in the opposite orientation) ((VL1-scFv linker-VH1-[optional domain linker]-VH2-CH1-hinge-CH2-CH3)). This embodiment further utilizes a common light chain comprising a variable light domain and a constant light domain that associates with the heavy chains to form two identical Fabs that bind CLDN18.2. As for many of the embodiments herein, these constructs include skew variants, pI variants, ablation variants, additional Fc variants, etc. as desired and described herein.

[0239] The present invention provides scFv-mAb formats where the CD3 binding domain sequences are as shown in FIG. 12 and wherein the CLDN18.2 binding domain sequences are as shown in FIG. 10.

[0240] In addition, the Fc domains of the scFv-mAb format generally include skew variants (e.g. a set of amino acid substitutions as shown in FIG. 1, with particularly useful skew variants being selected from the group consisting of S364K/E357Q:L368D/K370S; L368D/K370S:S364K; L368E/K370S:S364K; T411T/E360E/Q362E:D401K; L368D/K370S:S364K/E357L, K370S:S364K/E357Q, T366S/L368A/Y407V:T366W and T366S/L368A/Y407V/Y349C:T366W/S354C), optionally ablation variants (including those shown in FIG. 3), optionally charged scFv linkers (including those shown in FIG. 5) and the heavy chain comprises pI variants (including those shown in FIG. 2).

[0241] In some embodiments, the scFv-mAb format includes skew variants, pI variants, and ablation variants. Accordingly, some embodiments include scFv-mAb formats that comprise: a) a first monomer that comprises the skew variants S364K/E357Q, the ablation variants E233P/L234V/L235A/G236del/S267K, and a variable heavy domain that, with the variable light domain of the common light chain, makes up an Fv that binds to CLDN18.2 as outlined herein, and a scFv domain that binds to CD3; b) a second monomer that comprises the skew variants L368D/K370S, the pI variants N208D/Q295E/N384D/Q418E/N421D, the ablation variants E233P/L234V/L235A/G236del/S267K, and a variable heavy domain that, with the variable light domain of the common light chain, makes up an Fv that binds to CLDN18.2 as outlined herein; and c) a common light chain comprising a variable light domain and a constant light domain.

[0242] In some embodiments, the scFv-mAb format includes skew variants, pI variants, ablation variants and FcRn variants. Accordingly, some embodiments include scFv-mAb formats that comprise: a) a first monomer that comprises the skew variants S364K/E357Q, the ablation variants E233P/L234V/L235A/G236del/S267K, the FcRn variants M428L/N434S and a variable heavy domain that, with the variable light domain of the common light chain, makes up an Fv that binds to CLDN18.2 as outlined herein, and a scFv domain that binds to CD3; b) a second monomer that comprises the skew variants L368D/K370S, the pI variants N208D/Q295E/N384D/Q418E/N421D, the ablation variants E233P/L234V/L235A/G236del/S267K, the FcRn variants M428L/N434S and a variable heavy domain that, with the variable light domain of the common light chain, makes up an Fv that binds to CLDN18.2 as outlined herein; and c) a common light chain comprising a variable light domain and a constant light domain.

[0243] For the mAb-scFv format backbone 1 (optionally including M428L/N434S) from FIG. 10, CD3 binding domain sequences finding particular use include, but are not limited to, anti-CD3 H1.30_L1.47, anti-CD3 H1.32_L1.47, anti-CD3 H1.89_L1.47, anti-CD3 H1.90_L1.47, anti-CD3 H1.33_L1.47 and anti-CD3 H1.31_L1.47, as depicted in FIG. 12.

Dual scFv Formats

[0244] The present invention also provides dual scFv formats as are known in the art and shown in FIG. 42B. In this embodiment, the CLDN18.2 x CD3 heterodimeric bispecific antibody is made up of two scFv-Fc monomers (both in either (VH-scFv linker-VL-[optional domain linker]-CH2-CH3) format or (VL-scFv linker-VH-[optional domain linker]-CH2-CH3) format, or with one monomer in one orientation and the other in the other orientation.

[0245] The present invention provides dual scFv formats where the CD3 binding domain sequences are as shown in FIG. 12 and wherein the CLDN18.2 binding domain sequences are as shown in FIG. 10.

[0246] In some embodiments, the dual scFv format includes skew variants, pI variants, and ablation variants. Accordingly, some embodiments include dual scFv formats that comprise: a) a first monomer that comprises the skew variants S364K/E357Q, the ablation variants E233P/L234V/L235A/G236del/S267K, and a first scFv that binds either CD3 or CLDN18.2; and b) a second monomer that comprises the skew variants L368D/K370S, the pI variants N208D/Q295E/N384D/ Q418E/N421D, the ablation variants E233P/L234V/L235A/G236del/S267K, and a second scFv that binds either CD3 or CLDN18.2.

[0247] In some embodiments, the dual scFv format includes skew variants, pI variants, ablation variants and FcRn variants. In some embodiments, the dual scFv format includes skew variants, pI variants, and ablation variants. Accordingly, some embodiments include dual scFv formats that comprise: a) a first monomer that comprises the skew variants S364K/E357Q, the ablation variants E233P/L234V/L235A/G236del/S267K, the FcRn variants M428L/N434S and a first scFv that binds either CD3 or CLDN18.2; and b) a second monomer that comprises the skew variants L368D/K370S, the pI variants N208D/Q295E/N384D/Q418E/N421D, the ablation variants E233P/L234V/L235A/G236del/S267K, the FcRn variants M428L/N434S and a second scFv that binds either CD3 or CLDN18.2.

[0248] For the dual scFv format, CD3 binding domain sequences finding particular use include, but are not limited to, anti-CD3 H1.30_L1.47, anti-CD3 H1.32_L1.47, anti-CD3 H1.89_L1.47, anti-CD3 H1.90_L1.47, anti-CD3 H1.33_L1.47 and anti-CD3 H1.31_L1.47, as well as depicted in FIG. 12.

### I. Antigen Binding Domains to Target Antigens

[0249] The bispecific antibodies of the invention have two different antigen binding domains (ABDs) that bind to two different target checkpoint antigens (“target pairs”), in either bivalent, bispecific formats or trivalent, bispecific formats as generally shown in FIG. 1. Note that generally these bispecific antibodies are named “anti-CLDN18.2 X anti-CD3”, or generally simplistically or for ease (and thus interchangeably) as “CLDN18.2 X CD3”, etc. for each pair. Note that unless specified herein, the order of the antigen list in the name does not confer structure; that is a CLDN18.2 X CD3 bottle opener antibody can have the scFv bind to CLDN18.2 or CD3, although in some cases, the order specifies structure as indicated.

[0250] As is more fully outlined herein, these combinations of ABDs can be in a variety of formats, as outlined below, generally in combinations where one ABD is in a Fab format and the other is in an scFv format. As discussed herein and shown in FIG. 42, some formats use a single Fab and a single scFv (FIGS. 42A, C and D), and some formats use two Fabs and a single scFv (FIGS. 42E, F, and I).

### Antigen Binding Domains

[0251] As discussed herein, the subject heterodimeric antibodies include two antigen binding domains (ABDs), each of which bind to CLDN18.2 or CD3. As outlined herein, these heterodimeric antibodies can be bispecific and bivalent (each antigen is bound by a single ABD, for example, in the format depicted in FIG. 42A), or bispecific and trivalent (one antigen is bound by a single ABD and the other is bound by two ABDs, for example as depicted in FIG. 42F).

[0252] In addition, in general, one of the ABDs comprises a scFv as outlined herein, in an orientation from N- to C-terminus of VH-scFv linker-VL or VL-scFv linker-VH. One or both of the other ABDs, according to the format, generally is a Fab, comprising a VH domain on one protein chain (generally as a component of a heavy chain) and a VL on another protein chain (generally as a component of a light chain).

[0253] The invention provides a number of ABDs that bind to a number of different checkpoint proteins, as outlined below. As will be appreciated by those in the art, any set of 6 CDRs or VH and VL domains can be in the scFv format or in the Fab format, which is then added to the heavy and light constant domains, where the heavy constant domains comprise variants (including within the CH1 domain as well as the Fc domain). The scFv sequences contained in the sequence listing utilize a particular charged linker, but as outlined herein, uncharged or other charged linkers can be used, including those depicted in FIG. 5.

[0254] In addition, as discussed above, the numbering used in the Sequence Listing for the identification of the CDRs is Kabat, however, different numbering can be used, which will change the amino acid sequences of the CDRs as shown in Table 1.

[0255] For all of the variable heavy and light domains listed herein, further variants can be made. As outlined herein, in some embodiments the set of 6 CDRs can have from 0, 1, 2, 3, 4 or 5 amino acid modifications (with amino acid substitutions finding particular use), as well as changes in the framework regions of the variable heavy and light domains, as long as the frameworks (excluding the CDRs) retain at least about 80, 85 or 90% identity to a human germline sequence selected from those listed in FIG. 1 of U.S. Pat. No.7,657,380, which Figure and Legend is incorporated by reference in its entirety herein. Thus, for example, the identical CDRs as described herein can be combined with different framework sequences from human germline sequences, as long as the framework regions retain at least 80, 85 or 90% identity to a human germline sequence selected from those listed in FIG. 1 of U.S. Pat. No. 7,657,380. Alternatively, the CDRs can have amino acid modifications (e.g. from 1, 2, 3, 4 or 5 amino acid modifications in the set of CDRs (that is, the CDRs can be modified as long as the total number of changes in the set of 6 CDRs is less than 6 amino acid modifications, with any combination of CDRs being changed; e.g. there may be one change in VLCDR1, two in VHCDR2, none in VHCDR3, etc.)), as well as having framework region changes, as long as the framework regions retain at least 80, 85 or 90% identity to a human germline sequence selected from those listed in FIG. 1 of U.S. Pat. No. 7,657,380.

### CLDN18.2 Antigen Binding Domains

[0256] In some embodiments, one of the ABDs binds CLDN18.2. Suitable sets of 6 CDRs and/or VH and VL domains are depicted in FIG. 10.

[0257] As will be appreciated by those in the art, suitable CLDN18.2 binding domains can comprise a set of 6 CDRs as depicted in the Figures, either as they are underlined or, in the case where a different numbering scheme is used as described herein and as shown in Table 1, as the CDRs that are identified using other alignments within the VH and VL sequences of those depicted in FIG. 10. Suitable ABDs can also include the entire VH and VL sequences as depicted in these sequences and Figures, used as scFvs or as Fabs. In many of the embodiments herein that contain an Fv to CLDN18.2, it is the Fab monomer that binds CLDN18.2.

[0258] In addition to the parental CDR sets disclosed in the figures and sequence listing that form an ABD to CLDN18.2, the invention provides variant CDR sets. In one embodiment, a set of 6 CDRs can have 1, 2, 3, 4 or 5 amino acid changes from the parental CDRs, as long as the CLDN18.2 ABD is still able to bind to the target antigen, as measured by at least one of a Biacore, surface plasmon resonance (SPR) and/or BLI (biolayer interferometry, e.g. Octet assay) assay, with the latter finding particular use in many embodiments.

[0259] In addition to the parental variable heavy and variable light domains disclosed herein that form an ABD to CLDN18.2, the invention provides variant VH and VL domains. In one embodiment, the variant VH and VL domains each can have from 1, 2, 3, 4, 5, 6, 7, 8, 9 or 10 amino acid changes from the parental VH and VL domain, as long as the ABD is still able to bind to the target antigen, as measured at least one of a Biacore, surface plasmon resonance (SPR) and/or BLI (biolayer interferometry, e.g. Octet assay) assay, with the latter finding particular use in many embodiments. In another embodiment, the variant VH and VL are at least 90, 95, 97, 98 or 99% identical to the respective parental VH or VL, as long as the ABD is still able to bind to the target antigen, as measured by at least one of a Biacore, surface plasmon resonance (SPR) and/or BLI (biolayer interferometry, e.g. Octet assay) assay, with the latter finding particular use in many embodiments.

[0260] Specific preferred embodiments include the H1L1 and H2L1 CLDN18.2 antigen binding domain, as a “Fab”, included within any of the bottle opener format backbones of FIG. 6.

[0261] Specific preferred embodiments include the H1L1 and H2L1 CLDN18.2 antigen binding domain, as a “Fab”, included within any of the 2+1 format backbones of FIG. 41.

### CD3 Antigen Binding Domains

[0262] In some embodiments, one of the ABDs binds CD3. Suitable sets of 6 CDRs and/or VH and VL domains, as well as scFv sequences, are depicted in FIGS. 12 and 13 and the Sequence Listing. CD3 binding domain sequences that are of particular use include, but are not limited to, anti-CD3 H1.30_L1.47, anti-CD3 H1.32_L1.47, anti-CD3 H1.89_L1.47, anti-CD3 H1.90_L1.47, anti-CD3 H1.33_L1.47 and anti-CD3 H1.31_L1.47, as depicted in FIG. 12.

[0263] As will be appreciated by those in the art, suitable CD3 binding domains can comprise a set of 6 CDRs as depicted in FIG. 12, either as they are underlined or, in the case where a different numbering scheme is used as described herein and as shown in Table 1, as the CDRs that are identified using other alignments within the VH and VL sequences of those depicted in FIG. 12. Suitable ABDs can also include the entire VH and VL sequences as depicted in these sequences and Figures, used as scFvs or as Fabs. In many of the embodiments herein that contain an Fv to CD3, it is the scFv monomer that binds CD3.

[0264] In addition to the parental CDR sets disclosed in the figures and sequence listing that form an ABD to CD3, the invention provides variant CDR sets. In one embodiment, a set of 6 CDRs can have 1, 2, 3, 4 or 5 amino acid changes from the parental CDRs, as long as the CD3 ABD is still able to bind to the target antigen, as measured by at least one of a Biacore, surface plasmon resonance (SPR) and/or BLI (biolayer interferometry, e.g. Octet assay) assay, with the latter finding particular use in many embodiments.

[0265] In addition to the parental variable heavy and variable light domains disclosed herein that form an ABD to CD3, the invention provides variant VH and VL domains. In one embodiment, the variant VH and VL domains each can have from 1, 2, 3, 4, 5, 6, 7, 8, 9 or 10 amino acid changes from the parental VH and VL domain, as long as the ABD is still able to bind to the target antigen, as measured at least one of a Biacore, surface plasmon resonance (SPR) and/or BLI (biolayer interferometry, e.g. Octet assay) assay, with the latter finding particular use in many embodiments. In another embodiment, the variant VH and VL are at least 90, 95, 97, 98 or 99% identical to the respective parental VH or VL, as long as the ABD is still able to bind to the target antigen, as measured by at least one of a Biacore, surface plasmon resonance (SPR) and/or BLI (biolayer interferometry, e.g. Octet assay) assay, with the latter finding particular use in many embodiments.

### J. Useful Embodiments

[0266] In one embodiment, a particular combination of skew and pI variants that finds use in the present invention is T366S/L368A/Y407V:T366W (optionally including a bridging disulfide, T366S/L368A/Y407V/Y349C:T366W/S354C) with one monomer comprises Q295E/N384D/Q418E/N481D and the other a positively charged scFv linker (when the format includes an scFv domain). As will be appreciated in the art, the “knobs in holes” variants do not change pI, and thus can be used on either monomer.

### K. Nucleic Acids of the Invention

[0267] The invention further provides nucleic acid compositions encoding the anti-CLDN18.2 antibodies provided herein, including, but not limited to, anti-CLDN18.2 x anti-CD3 bispecific antibodies and CLDN18.2 monospecific antibodies.

[0268] As will be appreciated by those in the art, the nucleic acid compositions will depend on the format and scaffold of the heterodimeric protein. Thus, for example, when the format requires three amino acid sequences, such as for the 1+1 Fab-scFv-Fc format (e.g. a first amino acid monomer comprising an Fc domain and a scFv, a second amino acid monomer comprising a heavy chain and a light chain), three nucleic acid sequences can be incorporated into one or more expression vectors for expression. Similarly, some formats (e.g. dual scFv formats such as disclosed in FIG. 1) only two nucleic acids are needed; again, they can be put into one or two expression vectors.

[0269] As is known in the art, the nucleic acids encoding the components of the invention can be incorporated into expression vectors as is known in the art, and depending on the host cells used to produce the heterodimeric antibodies of the invention. Generally the nucleic acids are operably linked to any number of regulatory elements (promoters, origin of replication, selectable markers, ribosomal binding sites, inducers, etc.). The expression vectors can be extra-chromosomal or integrating vectors.

[0270] The nucleic acids and/or expression vectors of the invention are then transformed into any number of different types of host cells as is well known in the art, including mammalian, bacterial, yeast, insect and/or fungal cells, with mammalian cells (e.g. CHO cells), finding use in many embodiments.

[0271] In some embodiments, nucleic acids encoding each monomer and the optional nucleic acid encoding a light chain, as applicable depending on the format, are each contained within a single expression vector, generally under different or the same promoter controls. In embodiments of particular use in the present invention, each of these two or three nucleic acids are contained on a different expression vector. As shown herein and in 62/025,931, hereby incorporated by reference, different vector ratios can be used to drive heterodimer formation. That is, surprisingly, while the proteins comprise first monomer:second monomer:light chains (in the case of many of the embodiments herein that have three polypeptides comprising the heterodimeric antibody) in a 1:1:2 ratio, these are not the ratios that give the best results.

[0272] The heterodimeric antibodies of the invention are made by culturing host cells comprising the expression vector(s) as is well known in the art. Once produced, traditional antibody purification steps are done, including an ion exchange chromatography step. As discussed herein, having the pIs of the two monomers differ by at least 0.5 can allow separation by ion exchange chromatography or isoelectric focusing, or other methods sensitive to isoelectric point. That is, the inclusion of pI substitutions that alter the isoelectric point (pI) of each monomer so that such that each monomer has a different pI and the heterodimer also has a distinct pI, thus facilitating isoelectric purification of the “1+1 Fab-scFv-Fc ” and “2+1” heterodimers (e.g., anionic exchange columns, cationic exchange columns). These substitutions also aid in the determination and monitoring of any contaminating dual scFv-Fc and mAb homodimers post-purification (e.g., IEF gels, cIEF, and analytical IEX columns).

### L. Biological and Biochemical Functionality of the Heterodimeric Bispecific Antibodies

[0273] Generally the bispecific CLDN18.2 x CD3 antibodies of the invention are administered to patients with cancer, and efficacy is assessed, in a number of ways as described herein. Thus, while standard assays of efficacy can be run, such as cancer load, size of tumor, evaluation of presence or extent of metastasis, etc., immuno-oncology treatments can be assessed on the basis of immune status evaluations as well. This can be done in a number of ways, including both in vitro and in vivo assays.

### M. Treatments

[0274] Once made, the compositions of the invention find use in a number of applications. CLDN18.2 is highly expressed in gastric tumors. Accordingly, the heterodimeric compositions of the invention find use in the treatment of such CLDN18.2 positive cancers.

### Antibody Compositions for In Vivo Administration

[0275] Formulations of the antibodies used in accordance with the present invention are prepared for storage by mixing an antibody having the desired degree of purity with optional pharmaceutically acceptable carriers, excipients or stabilizers (Remington's Pharmaceutical Sciences 16th edition, Osol, A. Ed. [1980]), in the form of lyophilized formulations or aqueous solutions. Acceptable carriers, excipients, or stabilizers are nontoxic to recipients at the dosages and concentrations employed, and include buffers such as phosphate, citrate, and other organic acids; antioxidants including ascorbic acid and methionine; preservatives (such as octadecyldimethylbenzyl ammonium chloride; hexamethonium chloride; benzalkonium chloride, benzethonium chloride; phenol, butyl or benzyl alcohol; alkyl parabens such as methyl or propyl paraben; catechol; resorcinol; cyclohexanol; 3-pentanol; and m-cresol); low molecular weight (less than about 10 residues) polypeptides; proteins, such as serum albumin, gelatin, or immunoglobulins; hydrophilic polymers such as polyvinylpyrrolidone; amino acids such as glycine, glutamine, asparagine, histidine, arginine, or lysine; monosaccharides, disaccharides, and other carbohydrates including glucose, mannose, or dextrins; chelating agents such as EDTA; sugars such as sucrose, mannitol, trehalose or sorbitol; salt-forming counter-ions such as sodium; metal complexes (e.g. Zn-protein complexes); and/or non-ionic surfactants such as TWEEN™, PLURONICS™ or polyethylene glycol (PEG).

### Administrative Modalities

[0276] The antibodies and chemotherapeutic agents of the invention are administered to a subject, in accord with known methods, such as intravenous administration as a bolus or by continuous infusion over a period of time.

### Treatment Modalities

[0277] In the methods of the invention, therapy is used to provide a positive therapeutic response with respect to a disease or condition. By “positive therapeutic response” is intended an improvement in the disease or condition, and/or an improvement in the symptoms associated with the disease or condition. For example, a positive therapeutic response would refer to one or more of the following improvements in the disease: (1) a reduction in the number of neoplastic cells; (2) an increase in neoplastic cell death; (3) inhibition of neoplastic cell survival; (5) inhibition (i.e., slowing to some extent, preferably halting) of tumor growth; (6) an increased patient survival rate; and (7) some relief from one or more symptoms associated with the disease or condition.

[0278] Positive therapeutic responses in any given disease or condition can be determined by standardized response criteria specific to that disease or condition. Tumor response can be assessed for changes in tumor morphology (i.e., overall tumor burden, tumor size, and the like) using screening techniques such as magnetic resonance imaging (MRI) scan, x-radiographic imaging, computed tomographic (CT) scan, bone scan imaging, endoscopy, and tumor biopsy sampling including bone marrow aspiration (BMA) and counting of tumor cells in the circulation.

[0279] In addition to these positive therapeutic responses, the subject undergoing therapy may experience the beneficial effect of an improvement in the symptoms associated with the disease.

[0280] Treatment according to the present invention includes a “therapeutically effective amount” of the medicaments used. A “therapeutically effective amount” refers to an amount effective, at dosages and for periods of time necessary, to achieve a desired therapeutic result.

[0281] A therapeutically effective amount may vary according to factors such as the disease state, age, sex, and weight of the individual, and the ability of the medicaments to elicit a desired response in the individual. A therapeutically effective amount is also one in which any toxic or detrimental effects of the antibody or antibody portion are outweighed by the therapeutically beneficial effects.

[0282] A “therapeutically effective amount” for tumor therapy may also be measured by its ability to stabilize the progression of disease. The ability of a compound to inhibit cancer may be evaluated in an animal model system predictive of efficacy in human tumors.

[0283] Alternatively, this property of a composition may be evaluated by examining the ability of the compound to inhibit cell growth or to induce apoptosis by in vitro assays known to the skilled practitioner. A therapeutically effective amount of a therapeutic compound may decrease tumor size, or otherwise ameliorate symptoms in a subject. One of ordinary skill in the art would be able to determine such amounts based on such factors as the subject's size, the severity of the subject's symptoms, and the particular composition or route of administration selected.

[0284] Dosage regimens are adjusted to provide the optimum desired response (e.g., a therapeutic response). For example, a single bolus may be administered, several divided doses may be administered over time or the dose may be proportionally reduced or increased as indicated by the exigencies of the therapeutic situation. Parenteral compositions may be formulated in dosage unit form for ease of administration and uniformity of dosage. Dosage unit form as used herein refers to physically discrete units suited as unitary dosages for the subjects to be treated; each unit contains a predetermined quantity of active compound calculated to produce the desired therapeutic effect in association with the required pharmaceutical carrier.

[0285] The specification for the dosage unit forms of the present invention are dictated by and directly dependent on (a) the unique characteristics of the active compound and the particular therapeutic effect to be achieved, and (b) the limitations inherent in the art of compounding such an active compound for the treatment of sensitivity in individuals.

[0286] The efficient dosages and the dosage regimens for the bispecific antibodies used in the present invention depend on the disease or condition to be treated and may be determined by the persons skilled in the art.

[0287] An exemplary, non-limiting range for a therapeutically effective amount of an bispecific antibody used in the present invention is about 0.1-100 mg/kg.

[0288] All cited references are herein expressly incorporated by reference in their entirety.

[0289] Whereas particular embodiments of the invention have been described above for purposes of illustration, it will be appreciated by those skilled in the art that numerous variations of the details may be made without departing from the invention as described in the appended claims.

### 2. EXAMPLES

[0290] Examples are provided below to illustrate the present invention. These examples are not meant to constrain the present invention to any particular application or theory of operation. For all constant region positions discussed in the present invention, numbering is according to the EU index as in Kabat (Kabat et al., 1991, Sequences of Proteins of Immunological Interest, 5th Ed., United States Public Health Service, National Institutes of Health, Bethesda, entirely incorporated by reference). Those skilled in the art of antibodies will appreciate that this convention consists of nonsequential numbering in specific regions of an immunoglobulin sequence, enabling a normalized reference to conserved positions in immunoglobulin families. Accordingly, the positions of any given immunoglobulin as defined by the EU index will not necessarily correspond to its sequential sequence.

[0291] General and specific scientific techniques are outlined in US Publications 2015/0307629, 2014/0288275 and WO2014/145806, all of which are expressly incorporated by reference in their entirety and particularly for the techniques outlined therein.

### 2.1 Example 1: Prototype Anti-CLDN18.2 x anti-CD3 Bispecific Antibodies

[0292] We investigated the potential of using anti-CLDN18.2 x anti-CD3 bispecific antibodies (bsAbs) to redirect CD3+ effector T cells to destroy CLDN18.2-expressing cell lines. Towards this, prototype anti-CLDN18.2 x anti-CD3 bsAbs were generated using the antigen binding domain (ABD) from a murine anti-CLDN18.2 antibody (see, e.g., U.S. Pat. No. 9,751,934, issued Sep. 5, 2017), sequences for which are depicted in FIG. 11. Sequences for anti-CD3 scFvs having different affinities for CD3 which use in the bsAbs are depicted in FIG. 12.

(a) 1A: Production of Prototype Anti-CLDN18.2 x anti-CD3 bsAbs

[0293] Schematics for illustrative anti-CLDN18.2 x anti-CD3 bsAbs are depicted in FIG. 13. FIG. 13A depicts the “1+1 Fab-scFv-Fc” format which comprises a single-chain Fv (“scFv”) recombinantly fused to one side of a heterodimeric Fc, a heavy chain variable region (VH) recombinantly fused to the other side of the heterodimeric Fc, and a light chain (LC) transfected separately so that a Fab domain is formed with the variable heavy domain. FIG. 13B depicts the “2+1 Fab₂-scFv-Fc” format which comprises a VH domain recombinantly fused to an scFv fused to one side of a heterodimeric Fc, a VH domain recombinantly fused to the other side of the heterodimeric Fc, and a LC transfected separately so that Fab domains are formed with the VH domain.

[0294] DNA encoding the anti-CLDN18.2 variable heavy chain variable and light chain variable domains was generated by gene synthesis and subcloned into a pTT5 expression vector containing appropriate fusion partners (e.g., constant regions or anti-CD3 scFv-Fc). DNA encoding anti-CD3 scFv-Fc heavy chains was generated by gene synthesis. DNA was transfected into HEK293E cells for expression. Sequences are depicted in FIGS. 14-15. An anti-RSV x anti-CD3 bispecific antibody was also generated as a control, sequences for which are depicted in FIG. 16.

(b) 1B: Binding and Redirected T Cell Cytotoxicity on NUGC-4 and KP-4 Cell Lines by Prototype Anti-CLDN18.2 x anti-CD3 bsAbs

[0295] WO 2014/075788 reported that NUGC-4 is a gastric carcinoma cell line expressing high levels of CLDN18.2, and KP-4 is a pancreatic carcinoma is a pancreatic carcinoma cell line expressing very low levels of CLDN18.2 (comparable to a negative control cell line). Accordingly, we investigated binding and redirected T cell cytotoxicity (RTCC) on NUGC-4 and KP-4 cell lines by illustrative prototype anti-CLDN18.2 x anti-CD3 bsAbs described above as well as an anti-RSV x anti-CD3 bsAb control.

[0296] In the binding experiment, 200,000 cells (either NUGC-4 or KP-4) were incubated with indicated concentrations of anti-CLDN18.2 x anti-CD3 bsAbs for an hour on ice. Samples were then washed and stained with Alexa Fluor® 647 AffiniPure F(ab′)₂ Fragment Goat Anti-Human IgG, Fcγ Fragment Specific secondary antibody (Jackson ImmunoResearch, West Grove, Penn.) for an hour on ice. Samples were washed again and analyzed by flow cytometry. Data depicting binding to KP-4 and NUGC-4 cells are depicted in FIG. 17.

[0297] In the experiment investigating RTCC, NUGC-4 or KP-4 were incubated with human PBMCs (10:1 effector to target cell ratio) and indicated concentrations of anti-CLDN18.2 x anti-CD3 bsAbs for 24 hours at 37° C. RTCC was determined using CytoTox-ONE™ Homogeneous Membrane Integrity Assay (Promega, Madison, Wis.) to measure lactate dehydrogenase levels according to manufacturer's instructions and data was acquired on a Wallac Victor2 Micrplate Reader (PerkinElmer, Waltham, Mass.), data for which are depicted in FIG. 18.

[0298] Collectively, the data show that the prototype anti-CLDN18.2 x anti-CD3 bsAbs dose-dependently bound to NUGC-4 cells, with close to baseline binding to KP-4 cells at all concentrations tested. Notably, bsAbs of the “2+1 Fab2-scFv-Fc” format (i.e. XENP24647, XENP24648, and XENP24949) bound much more potently to NUGC-4 cells than did bsAbs of the “1+1 Fab-scFv-Fc” format (i.e. XENP24645 and XENP24646) due to the extra avidity conveyed by the “2+1 Fab2-scFv-Fc” format. Consistent with cell-binding, the data show that the prototype anti-CLDN18.2 x anti-CD3 bsAbs dose-dependently induced RTCC on NUGC-4, and no RTCC on KP-4 cells.

(c) 1C: Further Characterization of Prototype Anti-CLDN18.2 x Anti-CD3 bsAbs Using NUGC-4 and SNU-601 Cells

### (i) 1C(a): Identification of SNU-601 as CLDN18.2-Expressing Cell Line

[0299] In order to better characterize the anti-CLDN18.2 x anti-CD3 bsAbs of the invention, we sought to identify cell lines with higher CLDN18.2 expression levels than NUGC-4. We investigated the binding of XENP24647 to various cell lines using flow cytometry as follows. 200,000 cells from various cell lines (and Ramos as negative control) were incubated with XENP24647 for an hour on ice, followed by staining with PE AffiniPure F(ab′)₂ Fragment Goat Anti-Human IgG, Fcγ Fragment Specific secondary antibody (Jackson ImmunoResearch, West Grove, Penn.) for an hour on ice, and analyzed by flow cytometry. FIG. 19 depicts the binding of XENP24647 to NUGC-4 and SNU-601. The data indicate that SNU-601 expresses more CLDN18.2 than does NUGC-4. Accordingly, we further characterized prototype anti-CLDN18.2 x anti-CD3 bsAbs using NUGC-4 and SNU-601 cells.

(ii) 1C(b): Binding of Prototype Anti-CLDN18.2 x Anti-CD3 bsAbs on NUGC-4 and SNU-601 Cells

[0300] We investigated the binding of prototype anti-CLDN18.2 x anti-CD3 bsAbs on NUGC-4 and SNU-601 cells as generally described above. In particular, 200,000 cells from various cell lines (and Ramos as negative control) were incubated with indicated concentrations of indicated test articles for an hour on ice, followed by staining with PE AffiniPure F(ab′)₂ Fragment Goat Anti-Human IgG, Fcγ Fragment Specific secondary antibody (Jackson ImmunoResearch, West Grove, Penn.) for an hour on ice, and analyzed by flow cytometry. PE MFI indicating binding by the bsAbs to NUGC-4 and SNU-601 are depicted in FIG. 20. Each of the bsAbs dose-dependently bound to both NUGC-4 and SNU-601, with higher maximal binding to SNU-601 cells than to NUGC-4, which is consistent with the respective CLDN18.2 expression levels on each cell line. Consistent with Example 1B, the data show that the bsAbs in the “2+1 Fab2-scFv-Fc” format bound cells more potently than bsAbs in the “1+1 Fab-scFv-Fc” format.

(iii) 1C(c): Induction of Redirected T Cell Cytotoxicity on NUGC-4 and SNU-601 Cells by Prototype anti-CLDN18.2 x Anti-CD3 bsAbs

[0301] Next, we investigated RTCC by the prototype anti-CLDN18.2 x anti-CD3 bsAbs on NUGC-4 and SNU-601 as generally described above. In particular, NUGC-4 or SNU-601 cells were incubated with human PBMCs (20:1 effector to target cell ratio) and indicated concentrations of the indicated test articles and anti-CD107a-BV421 for 24 hours or 48 hours at 37° C. Control conditions included target cells only or target cells and effector cells without test articles. After incubation, samples were stained with the following antibodies for 1 hour on ice: anti-CD69-PE, anti-CD25-APC, anti-CD4-APC-Fire750, and anti-CD8-BV605. Cells were then stained with BUV395 Annexin-V (BD Bioscience, San Jose, Calif.) and 7-AAD Viability Staining Solution (BioLegend, San Diego, Calif.). Finally, cells were analyzed by flow cytometry.

[0302] AnnexinV and 7AAD binding are indicators of the induction of apoptosis. Accordingly, live cells were AnnexinV-7AAD-, while dead cells were a sum of AnnexinV+, 7AAD+, and AnnexinV+7AAD+ cells. Data depicting number of dead/dying target cells and live target cells following incubation with effector cells and indicated test articles are depicted in FIGS. 21-24. The data show that the bsAbs enhance killing of target cells (i.e. NUGC-4 and SNU-601 cells) as indicated by increase in dead/dying cells and well as decrease in live cells. Notably, the data show that higher affinity anti-CD3 arms enhance RTCC (for example in comparing XENP24645 and XENP24646; and in comparing XENP24647 and XENP24649). Further, in the case of bsAbs having the same anti-CD3 arm, bsAbs in the “2+1 Fab2-scFv-Fc” format enhance RTCC more potently than bsAbs in the “1 +1 Fab-scFv-Fc” format (for example in comparing XENP24647 and XENP24645). Additionally, the enhanced RTCC by “2+1 Fab2-scFv-Fc” bsAbs over “1+1 Fab-scFv-Fc” bsAbs (e.g. XENP24645 and XENP24647 which are respectively anti-CLDN18.2 x anti-CD3 bsAbs in the “1+1 Fab-scFv-Fc” and “2+1 Fab2-scFv-Fc” format, and having the same affinity for CD3) is more pronounced in SNU-601 which expresses higher levels of CLDN18.2, suggesting that the “2+1 Fab2-scFv-Fc” format provides selectivity for cell lines expressing higher levels of CLDN18.2.

[0303] We also investigated the activation of T cells by the bsAbs of the invention. CD69 is an early activation marker, and CD25 is a late activation marker, both of which are upregulated following T cell activation via TCR signaling. CD107a is a functional marker for T cell degranulation and cytotoxic activity. Effector cells were gated to identify CD4+ and CD8+ T cells. T cells were then gated for CD69, CD25, and CD107a expression. Data depicting upregulation of the markers on CD4+ and CD8+ T cells are depicted in FIGS. 25-28. The data shows a trend consistent with RTCC, that is for example, higher affinity CD3 binding and/or bivalent CLDN18.2 binding enhance T cell activation and degranulation.

### 2.2 Example 2: Generation of Anti-CLDN18.2 x Anti-CD3 bsAbs Having Humanized CLDN18.2 Antigen Binding Domains

### (a) 2A: Humanization of CLDN18.2 Antigen Binding Domains

[0304] We engineered two anti-CLDN18.2 mAbs having humanized variable regions using string content optimization (see, e.g., U.S. Pat. No. 7,657,380, issued Feb. 2, 2010), sequences for which are depicted in FIG. 29. Human germline identity was increased from 73.2% for the murine ABD to 86.6% and 88.3% respectively for the two variants (see FIG. 30). The variable regions from the humanized mAbs were used to generate additional anti-CLDN18.2 x anti-CD3 bsAbs in both the “1+1 Fab-scFv-Fc” and “2+1 Fab2-scFv-Fc” format as generally described in Example 1A, sequences for which are depicted in FIGS. 31-32.

### (b) 2B: Humanization of CLDN18.2 ABD Preserved Binding, RTCC, and T Cell Activation

[0305] Next, we compared cell binding, induction of RTCC, and induction of T cell activation by anti-CLDN18.2 x anti-CD3 bsAbs having murine CLDN18.2 ABDs and having humanized CLDN18.2 ABDs.

[0306] As observed in FIG. 19, although the SNU-601 cell line was characterized by higher levels of CLDN18.2 expression than the NUGC-4 cell line, the SNU-601 cell population was very heterogeneous for CLDN18.2 expression. Accordingly, using flow cytometry, we sorted SNU-601 cells based on CLDN18.2 expression and expanded CLDN18.2+ population for 4 days. The expanded CLDN18.2+ population (hereon referred to as enriched SNU-601 or SNU-601(2E4)) was re-assessed for CLDN18.2 expression as described in Example 1C(a) and compared to non-enriched SNU-601 cells, data for which are depicted in FIG. 33. The data show that the SNU-601(2E4) contains substantially higher population of CLDN18.2+ cells. Experiments in this section are performed using SNU-601(2E4) cells.

[0307] Binding by the bsAbs having humanized CLDN18.2 ABDs to SNU-601(2E4) cells were assessed as generally described in Example 1B. In particular, 200,000 SNU-601(2E4) cells were incubated with indicated concentrations of indicated test articles for an hour on ice. Samples were then stained with Alexa Fluor® 647 AffiniPure F(ab′)₂ Fragment Goat Anti-Human IgG, Fcγ Fragment Specific secondary antibody (Jackson ImmunoResearch, West Grove, Penn.), and analyzed by flow cytometry. Control samples included bsAbs having murine CLDN18.2 ABDs, bivalent anti-CLDN18.2 mAbs, cells only, and secondary antibody only. AlexaF657 MFI indicating binding by the test articles are depicted in FIG. 34. The data show that the bsAbs having humanized CLDN18.2 ABDs had similar binding to SNU-601(2E4) cells as bsAbs having murine CLDN18.2 ABDs indicating that humanization preserved the binding efficacy of the bsAbs. Notably, bsAbs in the “2+1 Fab2-scFv-Fc” format showed similar binding to bivalent anti-CLDN18.2 mAbs. Additionally, the data show that bsAbs based on the H1L1 humanized variant (e.g. XENP29472, XENP29474, XENP28476, and XENP29478) better preserved binding than did bsAbs based on the H2L1 humanized variant (e.g. XENP29473, XENP29475, XENP29477, and XENP29479).

[0308] Next, we investigated induction of RTCC on SNU-601(2E4) cells and T cell activation by the bsAbs having humanized CLDN18.2 ABDs. SNU-601(2E4) cells were labeled with CellTrace™ CFSE Cell Proliferation Kit (ThermoFisher Scientific, Waltham, Mass.). CFSE-labeled SNU-601(2E4) cells were incubated with human PBMCs (10:1 effector to target ratio) and anti-CD107a-BV421 for 24 hours at 37° C. After incubation, supernatant was collected for cytokine analysis by V-PLEX Proinflammatory Panel 1 Human Kit (according to manufacturer protocol; Meso Scale Discovery, Rockville, Md.) and cells were stained with Aqua Zombie stain for 15 minutes at room temperature. Cells were then washed and stained with anti-CD4-APC-Cy7, anti-CD8-perCP-Cy5.5, and anti-CD69-APC staining antibodies, and analyzed by flow cytometry. We used two different approaches for investigating induction of RTCC: a) decrease in the number of CSFE+ target cells (data for which are depicted in FIG. 35A), and b) Zombie Aqua staining on CSFE+ target cells (data for which are depicted in FIGS. 35B-C). We also investigated activation and degranulation of CD4+ and CD8+ T cells based on CD69 and CD107a expression (data for which are depicted in FIGS. 36-39). Finally, we investigated the secretion of IFNγ and TNFα by T cells, data for which are depicted in FIG. 40. Consistent with the binding data, humanization preserved the induction of RTCC and T cell activation and cytokine secretion by the bsAbs having humanized CLDN18.2 ABDs. Notably consistent with Example 1C(c), higher affinity CD3 binding and/or bivalent CLDN18.2 binding enhance potency of RTCC as well as T cell activation, degranulation, and cytokine secretion.

What is claimed is:

1. A heterodimeric antibody comprising:
a) a first monomer comprising, from N- to C-terminal, VH-CH1-domain linker-scFv-domain linker-CH2-CH3, wherein said CH2-CH3 is a first variant Fc domain;
b) a second monomer comprising, from N- to C-terminal, VH-CH1-hinge-CH2-CH3, wherein said CH2-CH3 is a second variant Fc domain; and
c) a common light chain comprising VL-CL;
wherein one of said variant Fc domains comprises amino acid substitutions N208D/Q295E/N384D/Q418E/N421D,
wherein said first and second variant Fc domains each comprise amino acid substitutions E233P/L234V/L235A/G236del/S267K,
wherein one of said variant Fc domains comprises amino acid substitutions S364K/E357Q and the other variant Fc domain comprises amino acid substitutions L368D/K370S,
wherein said scFv has a sequence selected from the group consisting of SEQ ID NO:87, SEQ ID NO:88, SEQ ID NO:98, SEQ ID NO:99, SEQ ID NO:109, SEQ ID NO:110, SEQ ID NO:120, SEQ ID NO:121, SEQ ID NO:131, SEQ ID NO:132, SEQ ID NO:142, SEQ ID NO:143;
wherein said VH domain comprises SEQ ID NO:81 or SEQ ID NO:82 and said VL domain comprises SEQ ID NO:84, wherein numbering is according to the EU index as in Kabat.

2. A heterodimeric antibody according to claim 1 selected from the group consisting of XENP24647, XENP31729, XENP24649, XENP31723, XENP31725, XENP31727, XENP29476, XENP29478, XENP31724, XENP31726, XENP31728, XENP29477, XENP29479, XENC10101, XENC10102, XENC10103, XENC10104, XENC10105, XENC10106, XENC10107, XENC10108, XENC10109, XENC10110, XENC10111, XENC10112, XENC10113, XENC10114, XENC10115, XENC10116, XENC10117, XENC10118, XENC10119, XENC10120, XENC10121, XENC10122, XENC10123, XENC10124, XENC10125, XENC10126, XENC10127, XENC10128, XENC10129, XENC10130, XENC10131, XENC10132, XENC10133, XENC10134, XENC10135, XENC10136, XENC10137, XENC10138, XENC10139, XENC10140, XENC10141, XENC10142, XENC10143, XENC10144, XENC10145, XENC10146, XENC10147, XENC10148, XENC10149, XENC10150, XENC10151, XENC10152, XENC10153, XENC10154, XENC10155 and XENC10156.

3. A composition comprising an anti-CLDN18.2 antigen binding domain (ABD), wherein said ABD comprises:
a) a variable heavy domain comprising SEQ ID NO:81; and
b) a variable light domain comprising SEQ ID NO:84.

4. A composition comprising an anti-CLDN18.2 antigen binding domain (ABD), wherein said ABD comprises:
a) a variable heavy domain comprising SEQ ID NO:82; and
b) a variable light domain comprising SEQ ID NO:84.

5. A nucleic acid composition comprising:
a) a first nucleic acid encoding a variable heavy domain selected from the group consisting of SEQ ID NO:81 and SEQ ID NO:82; and
b) a second nucleic acid encoding SEQ ID NO:84.

6. An expression vector comprising said first and second nucleic acids according to claim 5.

7. An expression vector composition comprising:
a) a first expression vector comprising said first nucleic acid of claim 5; and
b) a second expression vector comprising said second nucleic acid of claim 5.

8. A host cell comprising an expression vector according to claim 6 or an expression vector composition according to claim 7.

9. A method of producing an anti-CLDN18.2 ABD comprising culturing the host cell of claim 8 under conditions where said ABD is produced and recovering said ABD.

10. A heterodimeric antibody comprising:
a) a first monomer comprising, from N- to C-terminal, scFv-domain linker-CH2-CH3, wherein said CH2-CH3 is a first variant Fc domain;
b) a second monomer comprising, from N- to C-terminal, VH-CH1-hinge-CH2-CH3, wherein said CH2-CH3 is a second variant Fc domain; and
c) a third monomer comprising VL-CL;
wherein one of said variant Fc domains comprises amino acid substitutions N208D/Q295E/N384D/Q418E/N421D,
wherein said first and second variant Fc domains each comprise amino acid substitutions E233P/L234V/L235A/G236del/S267K,
wherein one of said variant Fc domains comprises amino acid substitutions S364K/E357Q and the other variant Fc domain comprises amino acid substitutions L368D/K370S,
wherein said scFv has a sequence selected from the group consisting of SEQ ID NO:87, SEQ ID NO:88, SEQ ID NO:98, SEQ ID NO:99, SEQ ID NO:109, SEQ ID NO:110, SEQ ID NO:120, SEQ ID NO:121, SEQ ID NO:131, SEQ ID NO:132, SEQ ID NO:142, SEQ ID NO:143;
wherein said variable heavy (VH) domain comprises SEQ ID NO:81 or SEQ ID NO:82 and said variable light (VL) domain comprises SEQ ID NO:84, wherein numbering is according to the EU index as in Kabat.

11. A heterodimeric antibody according to claim 10, wherein the CH1-hinge-CH2-CH3 component of the second heavy chain comprises SEQ ID NO:32, said first variant Fc domain comprises SEQ ID NO:33 and said constant light domain comprises SEQ ID NO:74.

12. A heterodimeric antibody according to claim 10 selected from the group consisting of XENP29472, XENP29473, XENP29474 and XENP29475.

13. A nucleic acid composition comprising:
a) a first nucleic acid encoding said first heavy chain of claim 10;
b) a second nucleic acid encoding said second heavy chain of claim 10; and
c) a third nucleic acid encoding said light chain of claim 10.

14. An expression vector composition comprising:
a) a first expression vector comprising said first nucleic acid of claim 13;
b) a second expression vector comprising said second nucleic acid of claim 13; and
c) a third expression vector comprising said third nucleic acid of claim 13.

15. A host cell comprising said expression vector composition of claim 14.

16. A method of making a heterodimeric antibody according to claim 10 comprising culturing said host cell of claim 15 under conditions wherein said antibody is expressed, and recovering said antibody.

17. A method of treating a gastric cancer in a subject in need thereof, comprising administering to said subject a heterodimeric antibody according to claim 10.

18. A heterodimeric antibody comprising:
a) a first monomer comprising, from N- to C-terminal, VH1-CH1-hinge-CH2-CH3-domain linker-VH2, wherein said CH2-CH3 is a first variant Fc domain;
b) a second monomer comprising, from N- to C-terminal, VH1-CH1-hinge-CH2-CH3-domain linker-VL2, wherein said CH2-CH3 is a second variant Fc domain; and
c) a common light chain comprising a VL1-CL;
wherein one of said variant Fc domains comprises amino acid substitutions N208D/Q295E/N384D/Q418E/N421D,
wherein said first and second variant Fc domains each comprise amino acid substitutions E233P/L234V/L235A/G236del/S267K;
wherein one of said variant Fc domains comprises amino acid substitutions S364K/E357Q and the other Fc domain comprises amino acid substitutions L368D/K370S;
wherein said VH2 and VL2 are selected from the pairs consisting of SEQ ID NO:89 and SEQ ID NO:93, SEQ ID NO:100 and SEQ ID NO:104, SEQ ID NO:111 and SEQ ID NO:115, SEQ ID NO:122 and SEQ ID NO:126, SEQ ID NO: 133 and SEQ ID NO:137, SEQ ID NO:144 and SEQ ID NO:148;
wherein said VH1 domain comprises SEQ ID NO:81 or SEQ ID NO:82 and said VL1 domain comprises SEQ ID NO:84, wherein numbering is according to the EU index as in Kabat.

19. A heterodimeric antibody comprising:
a) a first monomer comprising, from N- to C-terminal, VH1-CH1-hinge-CH2-CH3-domain linker-scFv, wherein said CH2-CH3 is a first variant Fc domain;
b) a second monomer comprising, from N- to C-terminal, VH1-CH1-hinge-CH2-CH3, wherein said CH2-CH3 is a second variant Fc domain; and
c) a common light chain comprising a VL1-CL;
wherein one of said variant Fc domains comprises amino acid substitutions N208D/Q295E/N384D/Q418E/N421D,
wherein said first and second variant Fc domains each comprise amino acid substitutions E233P/L234V/L235A/G236del/S267K;
wherein one of said variant Fc domains comprises amino acid substitutions S364K/E357Q and the other Fc domain comprises amino acid substitutions L368D/K370S;
wherein said scFv has a sequence selected from the group consisting of SEQ ID NO:87, SEQ ID NO:88, SEQ ID NO:98, SEQ ID NO:99, SEQ ID NO:109, SEQ ID NO:110, SEQ ID NO:120, SEQ ID NO:121, SEQ ID NO:131, SEQ ID NO:132, SEQ ID NO:142, SEQ ID NO:143; and wherein said VH1 domain comprises SEQ ID NO:81 or SEQ ID NO:82 and said VL1 domain comprises SEQ ID NO:84, wherein numbering is according to the EU index as in Kabat.

20. A heterodimeric antibody comprising:
a) a first monomer comprising, from N- to C-terminal, VH1-CH1-domain linker-VH2-domain linker-CH2-CH3, wherein said CH2-CH3 is a first variant Fc domain;
b) a second monomer comprising, from N- to C-terminal, VH1-CH1-domain linker-VL2-domain linker-CH2-CH3, wherein said CH2-CH3 is a second variant Fc domain; and
c) a common light chain comprising a VL1-CL;
wherein one of said variant Fc domains comprises amino acid substitutions N208D/Q295E/N384D/Q418E/N421D,
wherein said first and second variant Fc domains each comprise amino acid substitutions E233P/L234V/L235A/G236del/S267K;
wherein one of said variant Fc domains comprises amino acid substitutions S364K/E357Q and the other Fc domain comprises amino acid substitutions L368D/K370S;
wherein said VH2 and VL2 are selected from the pairs consisting of SEQ ID NO:89 and SEQ ID NO:93, SEQ ID NO:100 and SEQ ID NO:104, SEQ ID NO:111 and SEQ ID NO:115, SEQ ID NO:122 and SEQ ID NO:126, SEQ ID NO: 133 and SEQ ID NO:137, SEQ ID NO:144 and SEQ ID NO:148;
wherein said VH1 domain comprises SEQ ID NO:81 or SEQ ID NO:82 and said VL1 domain comprises SEQ ID NO:84, wherein numbering is according to the EU index as in Kabat.

21. A heterodimeric antibody comprising:
a) a first monomer comprising, from N- to C-terminal, VH-CH1-domain linker-scFv-domain linker-CH2-CH3, wherein said CH2-CH3 is a first variant Fc domain;
b) a second monomer comprising a second variant Fc domain comprising CH2-CH3; and
c) a light chain comprising VL-CL;
wherein one of said variant Fc domains comprises amino acid substitutions N208D/Q295E/N384D/Q418E/N421D,
wherein said first and second variant Fc domains each comprise amino acid substitutions E233P/L234V/L235A/G236del/S267K,
wherein one of said variant Fc domains comprises amino acid substitutions S364K/E357Q and the other variant Fc domain comprises amino acid substitutions L368D/K370S,
wherein said scFv has a sequence selected from the group consisting of SEQ ID NO:87, SEQ ID NO:88, SEQ ID NO:98, SEQ ID NO:99, SEQ ID NO:109, SEQ ID NO:110, SEQ ID NO:120, SEQ ID NO:121, SEQ ID NO:131, SEQ ID NO:132, SEQ ID NO:142, SEQ ID NO:143;
wherein said VH domain comprises SEQ ID NO:81 or SEQ ID NO:82 and said VL domain comprises SEQ ID NO:84, wherein numbering is according to the EU index as in Kabat.

22. A heterodimeric antibody comprising:
a) a first monomer comprising, from N- to C-terminal, scFv-domain linker-VH-CH1-hinge-CH2-CH3, wherein said CH2-CH3 is a first variant Fc domain;
b) a second monomer comprising a second variant Fc domain comprising CH2-CH3; and
c) a light chain comprising VL-CL;
wherein one of said variant Fc domains comprises amino acid substitutions N208D/Q295E/N384D/Q418E/N421D,
wherein said first and second variant Fc domains each comprise amino acid substitutions E233P/L234V/L235A/G236del/S267K,
wherein one of said variant Fc domains comprises amino acid substitutions S364K/E357Q and the other variant Fc domain comprises amino acid substitutions L368D/K370S,
wherein said scFv has a sequence selected from the group consisting of SEQ ID NO:87, SEQ ID NO:88, SEQ ID NO:98, SEQ ID NO:99, SEQ ID NO:109, SEQ ID NO:110, SEQ ID NO:120, SEQ ID NO:121, SEQ ID NO:131, SEQ ID NO:132, SEQ ID NO:142, SEQ ID NO:143;
wherein said VH domain comprises SEQ ID NO:81 or SEQ ID NO:82 and said VL domain comprises SEQ ID NO:84, wherein numbering is according to the EU index as in Kabat.

23. A heterodimeric antibody comprising:
a) a first monomer comprising, from N- to C-terminal, scFv-domain linker-VH-CH1-hinge-CH2-CH3, wherein said CH2-CH3 is a first variant Fc domain;
b) a second monomer comprising, from N- to C-terminal, VH-CH1-hinge-CH2-CH3, wherein said CH2-CH3 is a second variant Fc domain; and
c) a common light chain comprising VL-CL;
wherein one of said variant Fc domains comprises amino acid substitutions N208D/Q295E/N384D/Q418E/N421D,
wherein said first and second variant Fc domains each comprise amino acid substitutions E233P/L234V/L235A/G236del/S267K,
wherein one of said variant Fc domains comprises amino acid substitutions S364K/E357Q and the other variant Fc domain comprises amino acid substitutions L368D/K370S,
wherein said scFv has a sequence selected from the group consisting of SEQ ID NO:87, SEQ ID NO:88, SEQ ID NO:98, SEQ ID NO:99, SEQ ID NO:109, SEQ ID NO:110, SEQ ID NO:120, SEQ ID NO:121, SEQ ID NO:131, SEQ ID NO:132, SEQ ID NO:142, SEQ ID NO:143,
wherein said VH domain comprises SEQ ID NO:81 or SEQ ID NO:82 and said VL domain comprises SEQ ID NO:84, wherein numbering is according to the EU index as in Kabat.

24. A nucleic acid composition comprising:
a) a first nucleic acid encoding said first monomer of any of claims 1, 2, 10-12, and 18-23;
b) a second nucleic acid encoding said second monomer of any of claims 1, 2, 10-12, and 18-23, respectively; and
c) a third nucleic acid encoding said third monomer of any of claims 1, 2, 10-12, and 18-23, respectively.

25. An expression vector composition comprising:
a) a first expression vector comprising said first nucleic acid of claim 24;
b) a second expression vector comprising said second nucleic acid of claim 24; and
c) a third expression vector comprising said third nucleic acid of claim 24.

26. A host cell comprising said expression vector composition of claim 25.

27. A method of making a heterodimeric antibody according to any of claims 1, 2, 10-12, and 18-23 comprising culturing said host cell of claim 26 under conditions wherein said antibody is expressed, and recovering said antibody.

28. A method of treating a gastric cancer in a subject in need thereof, comprising administering to said subject a heterodimeric antibody according to any of claims 1, 2, 10-12, and 18-23.

The application's sequence listing, which the Patent Office published only in electronic form, follows.

SEQUENCE LISTING (491 sequences)

SEQ ID NO: 1 - protein, 15 aa, Artificial Sequence
  Description of Artificial Sequence: Synthetic peptide
  Positive Charged scFv Linkers Gly-Ser 15
GGGGSGGGGSGGGGS

SEQ ID NO: 2 - protein, 18 aa, Artificial Sequence
  Description of Artificial Sequence: Synthetic peptide
  Positive Charged scFv Linkers Whitlow linker
GSTSGSGKPGSGEGSTKG

SEQ ID NO: 3 - protein, 14 aa, Artificial Sequence
  Description of Artificial Sequence: Synthetic peptide
  Positive Charged scFv Linkers 6paxA_1 (+A)
IRPRAIGGSKPRVA

SEQ ID NO: 4 - protein, 15 aa, Artificial Sequence
  Description of Artificial Sequence: Synthetic peptide
  Positive Charged scFv Linkers +B
GKGGSGKGGSGKGGS

SEQ ID NO: 5 - protein, 15 aa, Artificial Sequence
  Description of Artificial Sequence: Synthetic peptide
  Positive Charged scFv Linkers +C
GGKGSGGKGSGGKGS

SEQ ID NO: 6 - protein, 15 aa, Artificial Sequence
  Description of Artificial Sequence: Synthetic peptide
  Positive Charged scFv Linkers +D
GGGKSGGGKSGGGKS

SEQ ID NO: 7 - protein, 15 aa, Artificial Sequence
  Description of Artificial Sequence: Synthetic peptide
  Positive Charged scFv Linkers +E
GKGKSGKGKSGKGKS

SEQ ID NO: 8 - protein, 15 aa, Artificial Sequence
  Description of Artificial Sequence: Synthetic peptide
  Positive Charged scFv Linkers +F
GGGKSGGKGSGKGGS

SEQ ID NO: 9 - protein, 15 aa, Artificial Sequence
  Description of Artificial Sequence: Synthetic peptide
  Positive Charged scFv Linkers +G
GKPGSGKPGSGKPGS

SEQ ID NO: 10 - protein, 20 aa, Artificial Sequence
  Description of Artificial Sequence: Synthetic peptide
  Positive Charged scFv Linkers +H
GKPGSGKPGSGKPGSGKPGS

SEQ ID NO: 11 - protein, 20 aa, Artificial Sequence
  Description of Artificial Sequence: Synthetic peptide
  Positive Charged scFv Linkers +I
GKGKSGKGKSGKGKSGKGKS

SEQ ID NO: 12 - protein, 20 aa, Artificial Sequence
  Description of Artificial Sequence: Synthetic peptide
  Negative Charged scFv Linkers Gly-Ser 20
GGGGSGGGGSGGGGSGGGGS

SEQ ID NO: 13 - protein, 14 aa, Artificial Sequence
  Description of Artificial Sequence: Synthetic peptide
  Negative Charged scFv Linkers 3hsc_2 (-A)
STAGDTHLGGEDFD

SEQ ID NO: 14 - protein, 15 aa, Artificial Sequence
  Description of Artificial Sequence: Synthetic peptide
  Negative Charged scFv Linkers -B
GEGGSGEGGSGEGGS

SEQ ID NO: 15 - protein, 15 aa, Artificial Sequence
  Description of Artificial Sequence: Synthetic peptide
  Negative Charged scFv Linkers -C
GGEGSGGEGSGGEGS

SEQ ID NO: 16 - protein, 15 aa, Artificial Sequence
  Description of Artificial Sequence: Synthetic peptide
  Negative Charged scFv Linkers -D
GGGESGGGESGGGES

SEQ ID NO: 17 - protein, 15 aa, Artificial Sequence
  Description of Artificial Sequence: Synthetic peptide
  Negative Charged scFv Linkers -E
GEGESGEGESGEGES

SEQ ID NO: 18 - protein, 15 aa, Artificial Sequence
  Description of Artificial Sequence: Synthetic peptide
  Negative Charged scFv Linkers -F
GGGESGGEGSGEGGS

SEQ ID NO: 19 - protein, 20 aa, Artificial Sequence
  Description of Artificial Sequence: Synthetic peptide
  Negative Charged scFv Linkers -G
GEGESGEGESGEGESGEGES

SEQ ID NO: 20 - protein, 15 aa, Artificial Sequence
  Description of Artificial Sequence: Synthetic peptide
  Additional scFv and domain Linkers
GGGGSGGGGSGGGGS

SEQ ID NO: 21 - protein, 20 aa, Artificial Sequence
  Description of Artificial Sequence: Synthetic peptide
  Additional scFv and domain Linkers
GGGGSGGGGSGGGGSGGGGS

SEQ ID NO: 22 - protein, 18 aa, Artificial Sequence
  Description of Artificial Sequence: Synthetic peptide
  Additional scFv and domain Linkers
GSTSGSGKPGSGEGSTKG

SEQ ID NO: 23 - protein, 19 aa, Artificial Sequence
  Description of Artificial Sequence: Synthetic peptide
  Additional scFv and domain Linkers
PRGASKSGSASQTGSAPGS

SEQ ID NO: 24 - protein, 19 aa, Artificial Sequence
  Description of Artificial Sequence: Synthetic peptide
  Additional scFv and domain Linkers
GTAAAGAGAAGGAAAGAAG

SEQ ID NO: 25 - protein, 19 aa, Artificial Sequence
  Description of Artificial Sequence: Synthetic peptide
  Additional scFv and domain Linkers
GTSGSSGSGSGGSGSGGGG

SEQ ID NO: 26 - protein, 20 aa, Artificial Sequence
  Description of Artificial Sequence: Synthetic peptide
  Additional scFv and domain Linkers
GKPGSGKPGSGKPGSGKPGS

SEQ ID NO: 27 - protein, 9 aa, Artificial Sequence
  Description of Artificial Sequence: Synthetic peptide
  Useful domain linkers "half hinge"
KTHTCPPCP

SEQ ID NO: 28 - protein, 15 aa, Artificial Sequence
  Description of Artificial Sequence: Synthetic peptide
  Useful domain linkers "full hinge C220S variant"
EPKSSDKTHTCPPCP

SEQ ID NO: 29 - protein, 19 aa, Artificial Sequence
  Description of Artificial Sequence: Synthetic peptide
  Useful domain linkers "flex half hinge"
GGGGSGGGGSKTHTCPPCP

SEQ ID NO: 30 - protein, 19 aa, Artificial Sequence
  Description of Artificial Sequence: Synthetic peptide
  Useful domain linkers "charged half hinge1"
GKPGSGKPGSKTHTCPPCP

SEQ ID NO: 31 - protein, 14 aa, Artificial Sequence
  Description of Artificial Sequence: Synthetic peptide
  Useful domain linkers "charged half hinge2"
GKPGSKTHTCPPCP

SEQ ID NO: 32 - protein, 329 aa, Artificial Sequence
  Description of Artificial Sequence: Synthetic polypeptide
  1 + 1 Fab-scFv-Fc Backbone 1 Fab-Fc Side
ASTKGPSVFPLAPSSKSTSGGTAALGCLVKDYFPEPVTVSWNSGALTSGVHTFPAVLQSSGLYSLSSVVTVPSSSLGTQTYICNVNHKPSDTKVDKKVEPKSCDKTHTCPPCPAPPVAGPSVFLFPPKPKDTLMISRTPEVTCVVVDVKHEDPEVKFNWYVDGVEVHNAKTKPREEEYNSTYRVVSVLTVLHQDWLNGKEYKCKVSNKALPAPIEKTISKAKGQPREPQVYTLPPSREEMTKNQVSLTCDVSGFYPSDIAVEWESDGQPENNYKTTPPVLDSDGSFFLYSKLTVDKSRWEQGDVFSCSVMHEALHNHYTQKSLSLSPGK

SEQ ID NO: 33 - protein, 231 aa, Artificial Sequence
  Description of Artificial Sequence: Synthetic polypeptide
  1 + 1 Fab-scFv-Fc Backbone 1 scFv-Fc Side
EPKSSDKTHTCPPCPAPPVAGPSVFLFPPKPKDTLMISRTPEVTCVVVDVKHEDPEVKFNWYVDGVEVHNAKTKPREEQYNSTYRVVSVLTVLHQDWLNGKEYKCKVSNKALPAPIEKTISKAKGQPREPQVYTLPPSREQMTKNQVKLTCLVKGFYPSDIAVEWESNGQPENNYKTTPPVLDSDGSFFLYSKLTVDKSRWQQGNVFSCSVMHEALHNHYTQKSLSLSPGK

SEQ ID NO: 34 - protein, 329 aa, Artificial Sequence; identical to SEQ ID NO: 32
  Description of Artificial Sequence: Synthetic polypeptide
  1 + 1 Fab-scFv-Fc Backbone 2 Fab-Fc Side

SEQ ID NO: 35 - protein, 231 aa, Artificial Sequence
  Description of Artificial Sequence: Synthetic polypeptide
  1 + 1 Fab-scFv-Fc Backbone 2 scFv-Fc Side
EPKSSDKTHTCPPCPAPPVAGPSVFLFPPKPKDTLMISRTPEVTCVVVDVKHEDPEVKFNWYVDGVEVHNAKTKPREEQYNSTYRVVSVLTVLHQDWLNGKEYKCKVSNKALPAPIEKTISKAKGQPREPQVYTLPPSREEMTKNQVKLTCLVKGFYPSDIAVEWESNGQPENNYKTTPPVLDSDGSFFLYSKLTVDKSRWQQGNVFSCSVMHEALHNHYTQKSLSLSPGK

SEQ ID NO: 36 - protein, 329 aa, Artificial Sequence
  Description of Artificial Sequence: Synthetic polypeptide
  1 + 1 Fab-scFv-Fc Backbone 3 Fab-Fc Side
ASTKGPSVFPLAPSSKSTSGGTAALGCLVKDYFPEPVTVSWNSGALTSGVHTFPAVLQSSGLYSLSSVVTVPSSSLGTQTYICNVNHKPSDTKVDKKVEPKSCDKTHTCPPCPAPPVAGPSVFLFPPKPKDTLMISRTPEVTCVVVDVKHEDPEVKFNWYVDGVEVHNAKTKPREEEYNSTYRVVSVLTVLHQDWLNGKEYKCKVSNKALPAPIEKTISKAKGQPREPQVYTLPPSREEMTKNQVSLTCEVSGFYPSDIAVEWESDGQPENNYKTTPPVLDSDGSFFLYSKLTVDKSRWEQGDVFSCSVMHEALHNHYTQKSLSLSPGK

SEQ ID NO: 37 - protein, 231 aa, Artificial Sequence; identical to SEQ ID NO: 35
  Description of Artificial Sequence: Synthetic polypeptide
  1 + 1 Fab-scFv-Fc Backbone 3 scFv-Fc Side

SEQ ID NO: 38 - protein, 329 aa, Artificial Sequence
  Description of Artificial Sequence: Synthetic polypeptide
  1 + 1 Fab-scFv-Fc Backbone 4 Fab-Fc Side
ASTKGPSVFPLAPSSKSTSGGTAALGCLVKDYFPEPVTVSWNSGALTSGVHTFPAVLQSSGLYSLSSVVTVPSSSLGTQTYICNVNHKPSDTKVDKKVEPKSCDKTHTCPPCPAPPVAGPSVFLFPPKPKDTLMISRTPEVTCVVVDVKHEDPEVKFNWYVDGVEVHNAKTKPREEEYNSTYRVVSVLTVLHQDWLNGKEYKCKVSNKALPAPIEKTISKAKGQPREPQVYTLPPSREEMTENEVSLTCLVKGFYPSDIAVEWESDGQPENNYKTTPPVLDSDGSFFLYSKLEVDKSRWEQGDVFSCSVMHEALHNHYTQKSLSLSPGK

SEQ ID NO: 39 - protein, 231 aa, Artificial Sequence
  Description of Artificial Sequence: Synthetic polypeptide
  1 + 1 Fab-scFv-Fc Backbone 4 scFv-Fc Side
EPKSSDKTHTCPPCPAPPVAGPSVFLFPPKPKDTLMISRTPEVTCVVVDVKHEDPEVKFNWYVDGVEVHNAKTKPREEQYNSTYRVVSVLTVLHQDWLNGKEYKCKVSNKALPAPIEKTISKAKGQPREPQVYTLPPSREEMTKNQVSLTCLVKGFYPSDIAVEWESNGQPENNYKTTPPVLDSKGSFFLYSKLTVDKSRWQQGNVFSCSVMHEALHNHYTQKSLSLSPGK

SEQ ID NO: 40 - protein, 329 aa, Artificial Sequence
  Description of Artificial Sequence: Synthetic polypeptide
  1 + 1 Fab-scFv-Fc Backbone 5 Fab-Fc Side
ASTKGPSVFPLAPSSKSTSGGTAALGCLVKDYFPEPVTVSWNSGALTSGVHTFPAVLQSSGLYSLSSVVTVPSSSLGTQTYICNVNHKPSDTKVDKKVEPKSCDKTHTCPPCPAPPVAGPSVFLFPPKPKDTLMISRTPEVTCVVVDVKHEDPEVKFNWYVDGVEVHNAKTKPREEEYNSTYRVVSVLTVLHQDWLNGKEYKCKVSNKALPAPIEKTISKAKGQPREPQVYTLPPSRDELTKNQVSLTCDVSGFYPSDIAVEWESDGQPENNYKTTPPVLDSDGSFFLYSKLTVDKSRWEQGDVFSCSVMHEALHNHYTQKSLSLSPGK

SEQ ID NO: 41 - protein, 231 aa, Artificial Sequence
  Description of Artificial Sequence: Synthetic polypeptide
  1 + 1 Fab-scFv-Fc Backbone 5 scFv-Fc Side
EPKSSDKTHTCPPCPAPPVAGPSVFLFPPKPKDTLMISRTPEVTCVVVDVKHEDPEVKFNWYVDGVEVHNAKTKPREEQYNSTYRVVSVLTVLHQDWLNGKEYKCKVSNKALPAPIEKTISKAKGQPREPQVYTLPPSRDQLTKNQVKLTCLVKGFYPSDIAVEWESNGQPENNYKTTPPVLDSDGSFFLYSKLTVDKSRWQQGNVFSCSVMHEALHNHYTQKSLSLSPGK

SEQ ID NO: 42 - protein, 329 aa, Artificial Sequence
  Description of Artificial Sequence: Synthetic polypeptide
  1 + 1 Fab-scFv-Fc Backbone 6 Fab-Fc Side
ASTKGPSVFPLAPSSKSTSGGTAALGCLVKDYFPEPVTVSWNSGALTSGVHTFPAVLQSSGLYSLSSVVTVPSSSLGTQTYICNVNHKPSDTKVDKKVEPKSCDKTHTCPPCPAPPVAGPSVFLFPPKPKDTLMISRTPEVTCVVVDVKHEDPEVKFNWYVDGVEVHNAKTKPREEEYASTYRVVSVLTVLHQDWLNGKEYKCKVSNKALPAPIEKTISKAKGQPREPQVYTLPPSREEMTKNQVSLTCDVSGFYPSDIAVEWESDGQPENNYKTTPPVLDSDGSFFLYSKLTVDKSRWEQGDVFSCSVMHEALHNHYTQKSLSLSPGK

SEQ ID NO: 43 - protein, 231 aa, Artificial Sequence
  Description of Artificial Sequence: Synthetic polypeptide
  1 + 1 Fab-scFv-Fc Backbone 6 scFv-Fc Side
EPKSSDKTHTCPPCPAPPVAGPSVFLFPPKPKDTLMISRTPEVTCVVVDVKHEDPEVKFNWYVDGVEVHNAKTKPREEQYASTYRVVSVLTVLHQDWLNGKEYKCKVSNKALPAPIEKTISKAKGQPREPQVYTLPPSREQMTKNQVKLTCLVKGFYPSDIAVEWESNGQPENNYKTTPPVLDSDGSFFLYSKLTVDKSRWQQGNVFSCSVMHEALHNHYTQKSLSLSPGK

SEQ ID NO: 44 - protein, 329 aa, Artificial Sequence
  Description of Artificial Sequence: Synthetic polypeptide
  1 + 1 Fab-scFv-Fc Backbone 7 Fab-Fc Side
ASTKGPSVFPLAPSSKSTSGGTAALGCLVKDYFPEPVTVSWNSGALTSGVHTFPAVLQSSGLYSLSSVVTVPSSSLGTQTYICNVNHKPSDTKVDKKVEPKSCDKTHTCPPCPAPPVAGPSVFLFPPKPKDTLMISRTPEVTCVVVDVKHEDPEVKFNWYVDGVEVHNAKTKPREEEYSSTYRVVSVLTVLHQDWLNGKEYKCKVSNKALPAPIEKTISKAKGQPREPQVYTLPPSREEMTKNQVSLTCDVSGFYPSDIAVEWESDGQPENNYKTTPPVLDSDGSFFLYSKLTVDKSRWEQGDVFSCSVMHEALHNHYTQKSLSLSPGK

SEQ ID NO: 45 - protein, 231 aa, Artificial Sequence
  Description of Artificial Sequence: Synthetic polypeptide
  1 + 1 Fab-scFv-Fc Backbone 7 scFv-Fc Side
EPKSSDKTHTCPPCPAPPVAGPSVFLFPPKPKDTLMISRTPEVTCVVVDVKHEDPEVKFNWYVDGVEVHNAKTKPREEQYSSTYRVVSVLTVLHQDWLNGKEYKCKVSNKALPAPIEKTISKAKGQPREPQVYTLPPSREQMTKNQVKLTCLVKGFYPSDIAVEWESNGQPENNYKTTPPVLDSDGSFFLYSKLTVDKSRWQQGNVFSCSVMHEALHNHYTQKSLSLSPGK

SEQ ID NO: 46 - protein, 327 aa, Artificial Sequence
  Description of Artificial Sequence: Synthetic polypeptide
  1 + 1 Fab-scFv-Fc Backbone 8 Fab-Fc Side
ASTKGPSVFPLAPCSRSTSESTAALGCLVKDYFPEPVTVSWNSGALTSGVHTFPAVLQSSGLYSLSSVVTVPSSSLGTKTYTCNVDHKPSDTKVDKRVESKYGPPCPPCPAPEFLGGPSVFLFPPKPKDTLMISRTPEVTCVVVDVSQEDPEVQFNWYVDGVEVHNAKTKPREEEFNSTYRVVSVLTVLHQDWLNGKEYKCKVSNKGLPSSIEKTISKAKGQPREPQVYTLPPSQEEMTKNQVSLTCDVSGFYPSDIAVEWESDGQPENNYKTTPPVLDSDGSFFLYSRLTVDKSRWEEGDVFSCSVMHEALHNHYTQKSLSLSLGK

SEQ ID NO: 47 - protein, 229 aa, Artificial Sequence
  Description of Artificial Sequence: Synthetic polypeptide
  1 + 1 Fab-scFv-Fc Backbone 8 scFv-Fc Side
ESKYGPPCPPCPAPEFLGGPSVFLFPPKPKDTLMISRTPEVTCVVVDVSQEDPEVQFNWYVDGVEVHNAKTKPREEQFNSTYRVVSVLTVLHQDWLNGKEYKCKVSNKGLPSSIEKTISKAKGQPREPQVYTLPPSQEQMTKNQVKLTCLVKGFYPSDIAVEWESNGQPENNYKTTPPVLDSDGSFFLYSRLTVDKSRWQEGNVFSCSVMHEALHNHYTQKSLSLSLGK

SEQ ID NO: 48 - protein, 326 aa, Artificial Sequence
  Description of Artificial Sequence: Synthetic polypeptide
  1 + 1 Fab-scFv-Fc Backbone 9 Fab-Fc Side
ASTKGPSVFPLAPCSRSTSESTAALGCLVKDYFPEPVTVSWNSGALTSGVHTFPAVLQSSGLYSLSSVVTVPSSNFGTQTYTCNVDHKPSDTKVDKTVERKCCVECPPCPAPPVAGPSVFLFPPKPKDTLMISRTPEVTCVVVDVSHEDPEVQFNWYVDGVEVHNAKTKPREEEFNSTFRVVSVLTVVHQDWLNGKEYKCKVSNKGLPAPIEKTISKTKGQPREPQVYTLPPSREEMTKNQVSLTCDVSGFYPSDIAVEWESDGQPENNYKTTPPMLDSDGSFFLYSKLTVDKSRWEQGDVFSCSVMHEALHNHYTQKSLSLSPGK

SEQ ID NO: 49 - protein, 228 aa, Artificial Sequence
  Description of Artificial Sequence: Synthetic polypeptide
  1 + 1 Fab-scFv-Fc Backbone 9 scFv-Fc Side
ERKCCVECPPCPAPPVAGPSVFLFPPKPKDTLMISRTPEVTCVVVDVSHEDPEVQFNWYVDGVEVHNAKTKPREEQFNSTFRVVSVLTVVHQDWLNGKEYKCKVSNKGLPAPIEKTISKTKGQPREPQVYTLPPSREQMTKNQVKLTCLVKGFYPSDIAVEWESNGQPENNYKTTPPMLDSDGSFFLYSKLTVDKSRWQQGNVFSCSVMHEALHNHYTQKSLSLSPGK

SEQ ID NO: 50 - protein, 326 aa, Artificial Sequence
  Description of Artificial Sequence: Synthetic polypeptide
  1 + 1 Fab-scFv-Fc Backbone 10 Fab-Fc Side
ASTKGPSVFPLAPCSRSTSESTAALGCLVKDYFPEPVTVSWNSGALTSGVHTFPAVLQSSGLYSLSSVVTVPSSNFGTQTYTCNVDHKPSDTKVDKTVERKCCVECPPCPAPPVAGPSVFLFPPKPKDTLMISRTPEVTCVVVDVKHEDPEVQFNWYVDGVEVHNAKTKPREEEFNSTFRVVSVLTVVHQDWLNGKEYKCKVSNKGLPAPIEKTISKTKGQPREPQVYTLPPSREEMTKNQVSLTCDVSGFYPSDIAVEWESDGQPENNYKTTPPMLDSDGSFFLYSKLTVDKSRWEQGDVFSCSVMHEALHNHYTQKSLSLSPGK

SEQ ID NO: 51 - protein, 228 aa, Artificial Sequence
  Description of Artificial Sequence: Synthetic polypeptide
  1 + 1 Fab-scFv-Fc Backbone 10 scFv-Fc Side
ERKCCVECPPCPAPPVAGPSVFLFPPKPKDTLMISRTPEVTCVVVDVKHEDPEVQFNWYVDGVEVHNAKTKPREEQFNSTFRVVSVLTVVHQDWLNGKEYKCKVSNKGLPAPIEKTISKTKGQPREPQVYTLPPSREQMTKNQVKLTCLVKGFYPSDIAVEWESNGQPENNYKTTPPMLDSDGSFFLYSKLTVDKSRWQQGNVFSCSVMHEALHNHYTQKSLSLSPGK

SEQ ID NO: 52 - protein, 329 aa, Artificial Sequence
  Description of Artificial Sequence: Synthetic polypeptide
  1 + 1 Fab-scFv-Fc Backbone 11 Fab-Fc Side
ASTKGPSVFPLAPSSKSTSGGTAALGCLVKDYFPEPVTVSWNSGALTSGVHTFPAVLQSSGLYSLSSVVTVPSSSLGTQTYICNVNHKPSDTKVDKKVEPKSCDKTHTCPPCPAPPVAGPSVFLFPPKPKDTLMISRTPEVTCVVVDVKHEDPEVKFNWYVDGVEVHNAKTKPREEEYNSTYRVVSVLTVLHQDWLNGKEYKCKVSNKALPAPIEKTISKAKGQPREPQVYTLPPSREEMTKNQVSLTCDVSGFYPSDIAVEWESDGQPENNYKTTPPVLDSDGSFFLYSKLTVDKSRWEQGDVFSCSVLHEALHSHYTQKSLSLSPGK

SEQ ID NO: 53 - protein, 231 aa, Artificial Sequence
  Description of Artificial Sequence: Synthetic polypeptide
  1 + 1 Fab-scFv-Fc Backbone 11 scFv-Fc Side
EPKSSDKTHTCPPCPAPPVAGPSVFLFPPKPKDTLMISRTPEVTCVVVDVKHEDPEVKFNWYVDGVEVHNAKTKPREEQYNSTYRVVSVLTVLHQDWLNGKEYKCKVSNKALPAPIEKTISKAKGQPREPQVYTLPPSREQMTKNQVKLTCLVKGFYPSDIAVEWESNGQPENNYKTTPPVLDSDGSFFLYSKLTVDKSRWQQGNVFSCSVLHEALHSHYTQKSLSLSPGK

SEQ ID NO: 54 - protein, 329 aa, Artificial Sequence
  Description of Artificial Sequence: Synthetic polypeptide
  1 + 1 Fab-scFv-Fc Backbone 12 Fab-Fc Side
ASTKGPSVFPLAPSSKSTSGGTAALGCLVKDYFPEPVTVSWNSGALTSGVHTFPAVLQSSGLYSLSSVVTVPSSSLGTQTYICNVNHKPSNTKVDKKVEPKSCDKTHTCPPCPAPPVAGPSVFLFPPKPKDTLMISRTPEVTCVVVDVKHEDPEVKFNWYVDGVEVHNAKTKPREEQYNSTYRVVSVLTVLHQDWLNGKEYKCKVSNKALPAPIEKTISKAKGQPREPQVYTLPPSREEMTKNQVSLTCDVAGFYPSDIAVEWESNGQPENNYKTTPPVLDSDGSFFLYSKLTVDKSRWQQGNVFSCSVMHEALHNHYTQKSLSLSPGK

SEQ ID NO: 55 - protein, 231 aa, Artificial Sequence
  Description of Artificial Sequence: Synthetic polypeptide
  1 + 1 Fab-scFv-Fc Backbone 12 scFv-Fc Side
ERKSSDKTHTCPPRPAPPVAGPSVFLFPPKPKDTLMISRTPEVTCVVVDVKHEDPEVKFKWYVDGVEVHNAKTKPREEQYNSTYRVVSVLTVLHQDWLNGKEYKCKVSNKALPAPIEKTISKAKGQPREPQVYTLPPSREQMTKNQVKLTCLVKGFYPSDIAVEWESNGQPENNYKTTPPVLDSDGSFFLYSKLTVDKSRWQQGNVFSCSVMHEALHNHYTQKSLSLSPGK

SEQ ID NO: 56 - protein, 329 aa, Artificial Sequence; identical to SEQ ID NO: 32
  Description of Artificial Sequence: Synthetic polypeptide
  2 + 1 Fab2-scFv-Fc Backbone 1 Fab-Fc Side (VH domain)

SEQ ID NO: 57 - protein, 216 aa, Artificial Sequence
  Description of Artificial Sequence: Synthetic polypeptide
  2 + 1 Fab2-scFv-Fc Backbone 1 Fab-scFv-Fc Side VH-CH1-domain linker1-scFv-domain linker2
APPVAGPSVFLFPPKPKDTLMISRTPEVTCVVVDVKHEDPEVKFNWYVDGVEVHNAKTKPREEQYNSTYRVVSVLTVLHQDWLNGKEYKCKVSNKALPAPIEKTISKAKGQPREPQVYTLPPSREQMTKNQVKLTCLVKGFYPSDIAVEWESNGQPENNYKTTPPVLDSDGSFFLYSKLTVDKSRWQQGNVFSCSVMHEALHNHYTQKSLSLSPGK

SEQ ID NO: 58 - protein, 329 aa, Artificial Sequence; identical to SEQ ID NO: 32
  Description of Artificial Sequence: Synthetic polypeptide
  2 + 1 Fab2-scFv-Fc Backbone 2 Fab-Fc Side (VH domain)

SEQ ID NO: 59 - protein, 216 aa, Artificial Sequence
  Description of Artificial Sequence: Synthetic polypeptide
  2 + 1 Fab2-scFv-Fc Backbone 2 Fab-scFv-Fc Side VH-CH1-domain linker-scFv-domain linker2
APPVAGPSVFLFPPKPKDTLMISRTPEVTCVVVDVKHEDPEVKFNWYVDGVEVHNAKTKPREEQYNSTYRVVSVLTVLHQDWLNGKEYKCKVSNKALPAPIEKTISKAKGQPREPQVYTLPPSREEMTKNQVKLTCLVKGFYPSDIAVEWESNGQPENNYKTTPPVLDSDGSFFLYSKLTVDKSRWQQGNVFSCSVMHEALHNHYTQKSLSLSPGK

SEQ ID NO: 60 - protein, 329 aa, Artificial Sequence; identical to SEQ ID NO: 36
  Description of Artificial Sequence: Synthetic polypeptide
  2 + 1 Fab2-scFv-Fc Backbone 3 Fab-Fc Side (VH domain)

SEQ ID NO: 61 - protein, 216 aa, Artificial Sequence; identical to SEQ ID NO: 59
  Description of Artificial Sequence: Synthetic polypeptide
  2 + 1 Fab2-scFv-Fc Backbone 3 Fab-scFv-Fc Side VH-CH1-domain linker1-scFv-domain linker2

SEQ ID NO: 62 - protein, 329 aa, Artificial Sequence; identical to SEQ ID NO: 38
  Description of Artificial Sequence: Synthetic polypeptide
  2 + 1 Fab2-scFv-Fc Backbone 4 Fab-Fc Side (VH domain)

SEQ ID NO: 63 - protein, 216 aa, Artificial Sequence
  Description of Artificial Sequence: Synthetic polypeptide
  2 + 1 Fab2-scFv-Fc Backbone 4 Fab-scFv-Fc Side VH-CH1-domain linker1-scFv-domain linker2
APPVAGPSVFLFPPKPKDTLMISRTPEVTCVVVDVKHEDPEVKFNWYVDGVEVHNAKTKPREEQYNSTYRVVSVLTVLHQDWLNGKEYKCKVSNKALPAPIEKTISKAKGQPREPQVYTLPPSREEMTKNQVSLTCLVKGFYPSDIAVEWESNGQPENNYKTTPPVLDSKGSFFLYSKLTVDKSRWQQGNVFSCSVMHEALHNHYTQKSLSLSPGK

SEQ ID NO: 64 - protein, 329 aa, Artificial Sequence; identical to SEQ ID NO: 40
  Description of Artificial Sequence: Synthetic polypeptide
  2 + 1 Fab2-scFv-Fc Backbone 5 Fab-Fc Side (VH domain)

SEQ ID NO: 65 - protein, 216 aa, Artificial Sequence
  Description of Artificial Sequence: Synthetic polypeptide
  2 + 1 Fab2-scFv-Fc Backbone 5 Fab-scFv-Fc Side VH-CH1-domain linker1-scFv-domain linker2
APPVAGPSVFLFPPKPKDTLMISRTPEVTCVVVDVKHEDPEVKFNWYVDGVEVHNAKTKPREEQYNSTYRVVSVLTVLHQDWLNGKEYKCKVSNKALPAPIEKTISKAKGQPREPQVYTLPPSRDQLTKNQVKLTCLVKGFYPSDIAVEWESNGQPENNYKTTPPVLDSDGSFFLYSKLTVDKSRWQQGNVFSCSVMHEALHNHYTQKSLSLSPGK

SEQ ID NO: 66 - protein, 329 aa, Artificial Sequence; identical to SEQ ID NO: 42
  Description of Artificial Sequence: Synthetic polypeptide
  2 + 1 Fab2-scFv-Fc Backbone 6 Fab-Fc Side (VH domain)

SEQ ID NO: 67 - protein, 216 aa, Artificial Sequence
  Description of Artificial Sequence: Synthetic polypeptide
  2 + 1 Fab2-scFv-Fc Backbone 6 Fab-scFv-Fc Side VH-CH1-domain linker1-scFv-domain linker2
APPVAGPSVFLFPPKPKDTLMISRTPEVTCVVVDVKHEDPEVKFNWYVDGVEVHNAKTKPREEQYASTYRVVSVLTVLHQDWLNGKEYKCKVSNKALPAPIEKTISKAKGQPREPQVYTLPPSREQMTKNQVKLTCLVKGFYPSDIAVEWESNGQPENNYKTTPPVLDSDGSFFLYSKLTVDKSRWQQGNVFSCSVMHEALHNHYTQKSLSLSPGK

SEQ ID NO: 68 - protein, 329 aa, Artificial Sequence; identical to SEQ ID NO: 44
  Description of Artificial Sequence: Synthetic polypeptide
  2 + 1 Fab2-scFv-Fc Backbone 7 Fab-Fc Side (VH domain)

SEQ ID NO: 69 - protein, 216 aa, Artificial Sequence
  Description of Artificial Sequence: Synthetic polypeptide
  2 + 1 Fab2-scFv-Fc Backbone 7 Fab-scFv-Fc Side VH-CH1-domain linker1-scFv-domain linker2
APPVAGPSVFLFPPKPKDTLMISRTPEVTCVVVDVKHEDPEVKFNWYVDGVEVHNAKTKPREEQYSSTYRVVSVLTVLHQDWLNGKEYKCKVSNKALPAPIEKTISKAKGQPREPQVYTLPPSREQMTKNQVKLTCLVKGFYPSDIAVEWESNGQPENNYKTTPPVLDSDGSFFLYSKLTVDKSRWQQGNVFSCSVMHEALHNHYTQKSLSLSPGK

SEQ ID NO: 70 - protein, 329 aa, Artificial Sequence; identical to SEQ ID NO: 52
  Description of Artificial Sequence: Synthetic polypeptide
  2 + 1 Fab2-scFv-Fc Backbone 8 Fab-Fc Side (VH domain)

SEQ ID NO: 71 - protein, 216 aa, Artificial Sequence
  Description of Artificial Sequence: Synthetic polypeptide
  2 + 1 Fab2-scFv-Fc Backbone 8 Fab-scFv-Fc Side VH-CH1-domain linker1-scFv-domain linker2
APPVAGPSVFLFPPKPKDTLMISRTPEVTCVVVDVKHEDPEVKFNWYVDGVEVHNAKTKPREEQYNSTYRVVSVLTVLHQDWLNGKEYKCKVSNKALPAPIEKTISKAKGQPREPQVYTLPPSREQMTKNQVKLTCLVKGFYPSDIAVEWESNGQPENNYKTTPPVLDSDGSFFLYSKLTVDKSRWQQGNVFSCSVLHEALHSHYTQKSLSLSPGK

SEQ ID NO: 72 - protein, 329 aa, Artificial Sequence; identical to SEQ ID NO: 54
  Description of Artificial Sequence: Synthetic polypeptide
  2 + 1 Fab2-scFv-Fc Backbone 9 Fab-Fc Side (VH domain)

SEQ ID NO: 73 - protein, 216 aa, Artificial Sequence
  Description of Artificial Sequence: Synthetic polypeptide
  2 + 1 Fab2-scFv-Fc Backbone 9 Fab-scFv-Fc Side VH-CH1-domain linker1-scFv-domain linker2
APPVAGPSVFLFPPKPKDTLMISRTPEVTCVVVDVKHEDPEVKFKWYVDGVEVHNAKTKPREEQYNSTYRVVSVLTVLHQDWLNGKEYKCKVSNKALPAPIEKTISKAKGQPREPQVYTLPPSREQMTKNQVKLTCLVKGFYPSDIAVEWESNGQPENNYKTTPPVLDSDGSFFLYSKLTVDKSRWQQGNVFSCSVMHEALHNHYTQKSLSLSPGK

SEQ ID NO: 74 - protein, 107 aa, Artificial Sequence [sequence omitted]

SEQ ID NO: 75 - protein, 106 aa, Artificial Sequence
  Description of Artificial Sequence: Synthetic polypeptide
  Constant Light Chain -  Lambda
GQPKAAPSVTLFPPSSEELQANKATLVCLISDFYPGAVTVAWKADSSPVKAGVETTTPSKQSNNKYAASSYLSLTPEQWKSHRSYSCQVTHEGSTVEKTVAPTECS

SEQ ID NO: 76 - protein, 261 aa, Homo sapiens
  sp|P56856-2|CLD18_HUMAN Isoform A2 of Claudin-18
MAVTACQGLGFVVSLIGIAGIIAATCMDQWSTQDLYNNPVTAVFNYQGLWRSCVRESSGFTECRGYFTLLGLPAMLQAVRALMIVGIVLGAIGLLVSIFALKCIRIGSMEDSAKANMTLTSGIMFIVSGLCAIAGVSVFANMLVTNFWMSTANMYTGMGGMVQTVQTRYTFGAALFVGWVAGGLTLIGGVMMCIACRGLAPEETNYKAVSYHASGHSVAYKPGGFKASTGFGSNTKNKKIYDGGARTEDEVQSYPSKHDYV

SEQ ID NO: 77 - protein, 264 aa, Mus musculus
  sp|P56857-3|CLD18_MOUSE Isoform A2.1 of Claudin-18
MSVTACQGLGFVVSLIGFAGIIAATCMDQWSTQDLYNNPVTAVFNYQGLWRSCVRESSGFTECRGYFTLLGLPAMLQAVRALMIVGIVLGVIGILVSIFALKCIRIGSMDDSAKAKMTLTSGILFIISGICAIIGVSVFANMLVTNFWMSTANMYSGMGGMGGMVQTVQTRYTFGAALFVGWVAGGLTLIGGVMMCIACRGLTPDDSNFKAVSYHASGQNVAYRPGGFKASTGFGSNTRNKKIYDGGARTEDDEQSHPTKYDYV

SEQ ID NO: 78 - protein, 208 aa, Mus musculus
  sp|P56857-4|CLD18_MOUSE Isoform A2.2 of Claudin-18
MSVTACQGLGFVVSLIGFAGIIAATCMDQWSTQDLYNNPVTAVFNYQGLWRSCVRESSGFTECRGYFTLLGLPAMLQAVRALMIVGIVLGVIGILVSIFALKCIRIGSMDDSAKAKMTLTSGILFIISGICAIIGVSVFANMLVTNFWMSTANMYSGMGGMGGMVQTVQTRYTFGAALFVGWVAGGLTLIGGVMMCIACRGLTPDDSK

SEQ ID NO: 79 - protein, 261 aa, Macaca fascicularis
  tr|A0A2K5VVB4|A0A2K5VVB4_MACFA Claudin
MSTTTCQVVAFLLSILGLAGCIAATGMDMWSTQDLYDNPVTSVFQYEGLWRSCVRQSSGFTECRPYFTILGLPAMLQAVRALMIVGIVLGAIGLLVSIFALKCIRIGSMEDSAKANMTLTSGIMFIVSGLCAIAGVSVFANMLVTNFWMSTANMYTGMGGMVQTVQTRYTFGAALFVGWVAGGLTLIGGVMMCIACRGLAPEETNYKAVSYHASGHSVAYKPGGFKASTGFGSNTKNKKTYDGGAHTEDELQSYPSKHDYV

SEQ ID NO: 80 - protein, 118 aa, Artificial Sequence
  Description of Artificial Sequence: Synthetic polypeptide
  [alphaClaudin18.2]_H0 Variable Heavy
QVQLQQPGAELVRPGASVKLSCKASGYTFTSYWINWVKQRPGQGLEWIGNIYPSDSYTNYNQKFKDKATLTVDKSSSTAYMQLSSPTSEDSAVYYCTRSWRGNSFDYWGQGTTLTVSS

SEQ ID NO: 81 - protein, 118 aa, Artificial Sequence
  Description of Artificial Sequence: Synthetic polypeptide
  [alphaClaudin18.2]_H1 Variable Heavy
EVQLVQSGAEVKKPGESLRISCKASGYTFTSYWINWVRQMPGKGLEWMGNIYPSDSYTNYNQKFQGHVTISVDKSISTAYLQWSSLKASDTAMYYCTRSWRGNSFDYWGQGTLVTVSS

SEQ ID NO: 82 - protein, 118 aa, Artificial Sequence
  Description of Artificial Sequence: Synthetic polypeptide
  [alphaClaudin18.2]_H2 Variable Heavy
QVQLVQSGAEVKKPGASVKVSCKASGYTFTSYWINWVRQAPGQGLEWMGNIYPSDSYTNYNQKFQGRVTMTVDKSTSTAYMELSSLRSEDTAVYYCTRSWRGNSFDYWGQGTLVTVSS

SEQ ID NO: 83 - protein, 113 aa, Artificial Sequence
  Description of Artificial Sequence: Synthetic polypeptide
  [alphaClaudin18.2]_L0 Variable Light
DIVMTQSPSSLTVTAGEKVTMSCKSSQSLLNSGNQKNYLTWYQQKPGQPPKLLIYWASTRESGVPDRFTGSGSGTDFTLTISSVQAEDLAVYYCQNDYSYPFTFGSGTKLEIK

SEQ ID NO: 84 - protein, 113 aa, Artificial Sequence
  Description of Artificial Sequence: Synthetic polypeptide
  [alphaClaudin18.2]_L1 Variable Light
DIVMTQSPDSLAVSLGERATINCKSSQSLLNSGNQKNYLTWYQQKPGQPPKLLIYWASTRESGVPDRFTGSGSGTDFTLTISSLQAEDVAVYYCQNDYSYPFTFGSGTKLEIK

SEQ ID NO: 85 - protein, 447 aa, Artificial Sequence
  Description of Artificial Sequence: Synthetic polypeptide
  XENP24644 Heavy Chain -  [alphaClaudin18.2]_H0_IgG1_PVA_/S267K
QVQLQQPGAELVRPGASVKLSCKASGYTFTSYWINWVKQRPGQGLEWIGNIYPSDSYTNYNQKFKDKATLTVDKSSSTAYMQLSSPTSEDSAVYYCTRSWRGNSFDYWGQGTTLTVSSASTKGPSVFPLAPSSKSTSGGTAALGCLVKDYFPEPVTVSWNSGALTSGVHTFPAVLQSSGLYSLSSVVTVPSSSLGTQTYICNVNHKPSNTKVDKKVEPKSCDKTHTCPPCPAPPVAGPSVFLFPPKPKDTLMISRTPEVTCVVVDVKHEDPEVKFNWYVDGVEVHNAKTKPREEQYNSTYRVVSVLTVLHQDWLNGKEYKCKVSNKALPAPIEKTISKAKGQPREPQVYTLPPSREEMTKNQVSLTCLVKGFYPSDIAVEWESNGQPENNYKTTPPVLDSDGSFFLYSKLTVDKSRWQQGNVFSCSVMHEALHNHYTQKSLSLSPGK

SEQ ID NO: 86 - protein, 220 aa, Artificial Sequence
  Description of Artificial Sequence: Synthetic polypeptide
  XENP24644 Light Chain -  [alphaClaudin18.2]_L0
DIVMTQSPSSLTVTAGEKVTMSCKSSQSLLNSGNQKNYLTWYQQKPGQPPKLLIYWASTRESGVPDRFTGSGSGTDFTLTISSVQAEDLAVYYCQNDYSYPFTFGSGTKLEIKRTVAAPSVFIFPPSDEQLKSGTASVVCLLNNFYPREAKVQWKVDNALQSGNSQESVTEQDSKDSTYSLSSTLTLSKADYEKHKVYACEVTHQGLSSPVTKSFNRGEC

SEQ ID NO: 87 - protein, 254 aa, Artificial Sequence
  Description of Artificial Sequence: Synthetic polypeptide
  Anti-CD3-High - [anti-CD3]_H1.30_L1.47_scFv scFv (VH-scFv linker-VL)
EVQLVESGGGLVQPGGSLRLSCAASGFTFSTYAMNWVRQAPGKGLEWVGRIRSKYNNYATYYADSVKGRFTISRDDSKNTLYLQMNSLRAEDTAVYYCVRHGNFGDSYVSWFAYWGQGTLVTVSSGKPGSGKPGSGKPGSGKPGSQAVVTQEPSLTVSPGGTVTLTCGSSTGAVTTSNYANWVQQKPGKSPRGLIGGTNKRAPGVPARFSGSLLGGKAALTISGAQPEDEADYYCALWYSNHWVFGGGTKLTVL

SEQ ID NO: 88 - protein, 254 aa, Artificial Sequence
  Description of Artificial Sequence: Synthetic polypeptide
  Anti-CD3-High - [anti-CD3]_H1.30_L1.47_scFv scFv (VL-scFv linker-VH)
QAVVTQEPSLTVSPGGTVTLTCGSSTGAVTTSNYANWVQQKPGKSPRGLIGGTNKRAPGVPARFSGSLLGGKAALTISGAQPEDEADYYCALWYSNHWVFGGGTKLTVLGKPGSGKPGSGKPGSGKPGSEVQLVESGGGLVQPGGSLRLSCAASGFTFSTYAMNWVRQAPGKGLEWVGRIRSKYNNYATYYADSVKGRFTISRDDSKNTLYLQMNSLRAEDTAVYYCVRHGNFGDSYVSWFAYWGQGTLVTVSS

SEQ ID NO: 89 - protein, 125 aa, Artificial Sequence
  Description of Artificial Sequence: Synthetic polypeptide
  Anti-CD3-High - [anti-CD3]_H1.30_L1.47_scFv Variable Heavy (vh) Domain
EVQLVESGGGLVQPGGSLRLSCAASGFTFSTYAMNWVRQAPGKGLEWVGRIRSKYNNYATYYADSVKGRFTISRDDSKNTLYLQMNSLRAEDTAVYYCVRHGNFGDSYVSWFAYWGQGTLVTVSS

SEQ ID NO: 90 - protein, 5 aa, Artificial Sequence
  Description of Artificial Sequence: Synthetic peptide
  Anti-CD3-High - [anti-CD3]_H1.30_L1.47_scFv vhCDR1
TYAMN

SEQ ID NO: 91 - protein, 19 aa, Artificial Sequence
  Description of Artificial Sequence: Synthetic peptide
  Anti-CD3-High - [anti-CD3]_H1.30_L1.47_scFv vhCDR2
RIRSKYNNYATYYADSVKG

SEQ ID NO: 92 - protein, 14 aa, Artificial Sequence
  Description of Artificial Sequence: Synthetic peptide
  Anti-CD3-High - [anti-CD3]_H1.30_L1.47_scFv vhCDR3
HGNFGDSYVSWFAY

SEQ ID NO: 93 - protein, 109 aa, Artificial Sequence
  Description of Artificial Sequence: Synthetic polypeptide
  Anti-CD3-High - [anti-CD3]_H1.30_L1.47_scFv Variable Light (vl) Domain
QAVVTQEPSLTVSPGGTVTLTCGSSTGAVTTSNYANWVQQKPGKSPRGLIGGTNKRAPGVPARFSGSLLGGKAALTISGAQPEDEADYYCALWYSNHWVFGGGTKLTVL

SEQ ID NO: 94 - protein, 14 aa, Artificial Sequence
  Description of Artificial Sequence: Synthetic peptide
  Anti-CD3-High - [anti-CD3]_H1.30_L1.47_scFv vlCDR1
GSSTGAVTTSNYAN

SEQ ID NO: 95 - protein, 7 aa, Artificial Sequence
  Description of Artificial Sequence: Synthetic peptide
  Anti-CD3-High - [anti-CD3]_H1.30_L1.47_scFv vlCDR2
GTNKRAP

SEQ ID NO: 96 - protein, 9 aa, Artificial Sequence
  Description of Artificial Sequence: Synthetic peptide
  Anti-CD3-High - [anti-CD3]_H1.30_L1.47_scFv vlCDR3
ALWYSNHWV

SEQ ID NO: 97 - protein, 20 aa, Artificial Sequence
  Description of Artificial Sequence: Synthetic peptide
  Anti-CD3-High - [anti-CD3]_H1.30_L1.47_scFv Linker
GKPGSGKPGSGKPGSGKPGS

SEQ ID NO: 98 - protein, 254 aa, Artificial Sequence
  Description of Artificial Sequence: Synthetic polypeptide
  Anti-CD3-High-Int #1 - [anti-CD3]_H1.32_L1.47_scFv scFv (VH-scFv linker-VL)
EVQLVESGGGLVQPGGSLRLSCAASGFTFSTYAMNWVRQAPGKGLEWVGRIRSKANNYATYYADSVKGRFTISRDDSKNTLYLQMNSLRAEDTAVYYCVRHGNFGDSYVSWFAYWGQGTLVTVSSGKPGSGKPGSGKPGSGKPGSQAVVTQEPSLTVSPGGTVTLTCGSSTGAVTTSNYANWVQQKPGKSPRGLIGGTNKRAPGVPARFSGSLLGGKAALTISGAQPEDEADYYCALWYSNHWVFGGGTKLTVL

SEQ ID NO: 99 - protein, 254 aa, Artificial Sequence
  Description of Artificial Sequence: Synthetic polypeptide
  Anti-CD3-High-Int #1 - [anti-CD3]_H1.32_L1.47_scFv scFv (VL-scFv linker-VH)
QAVVTQEPSLTVSPGGTVTLTCGSSTGAVTTSNYANWVQQKPGKSPRGLIGGTNKRAPGVPARFSGSLLGGKAALTISGAQPEDEADYYCALWYSNHWVFGGGTKLTVLGKPGSGKPGSGKPGSGKPGSEVQLVESGGGLVQPGGSLRLSCAASGFTFSTYAMNWVRQAPGKGLEWVGRIRSKANNYATYYADSVKGRFTISRDDSKNTLYLQMNSLRAEDTAVYYCVRHGNFGDSYVSWFAYWGQGTLVTVSS

SEQ ID NO: 100 - protein, 125 aa, Artificial Sequence
  Description of Artificial Sequence: Synthetic polypeptide
  Anti-CD3-High-Int #1 - [anti-CD3]_H1.32_L1.47_scFv Variable Heavy (vh) Domain
EVQLVESGGGLVQPGGSLRLSCAASGFTFSTYAMNWVRQAPGKGLEWVGRIRSKANNYATYYADSVKGRFTISRDDSKNTLYLQMNSLRAEDTAVYYCVRHGNFGDSYVSWFAYWGQGTLVTVSS

SEQ ID NO: 101 - protein, 5 aa, Artificial Sequence
  Description of Artificial Sequence: Synthetic peptide
  Anti-CD3-High-Int #1 - [anti-CD3]_H1.32_L1.47_scFv vhCDR1
TYAMN

SEQ ID NO: 102 - protein, 19 aa, Artificial Sequence
  Description of Artificial Sequence: Synthetic peptide
  Anti-CD3-High-Int #1 - [anti-CD3]_H1.32_L1.47_scFv vhCDR2
RIRSKANNYATYYADSVKG

SEQ ID NO: 103 - protein, 14 aa, Artificial Sequence
  Description of Artificial Sequence: Synthetic peptide
  Anti-CD3-High-Int #1 - [anti-CD3]_H1.32_L1.47_scFv vhCDR3
HGNFGDSYVSWFAY

SEQ ID NO: 104 - protein, 109 aa, Artificial Sequence; identical to SEQ ID NO: 93
  Description of Artificial Sequence: Synthetic polypeptide
  Anti-CD3-High-Int #1 - [anti-CD3]_H1.32_L1.47_scFv Variable Light (vl) Domain

SEQ ID NO: 105 - protein, 14 aa, Artificial Sequence
  Description of Artificial Sequence: Synthetic peptide
  Anti-CD3-High-Int #1 - [anti-CD3]_H1.32_L1.47_scFv vlCDR1
GSSTGAVTTSNYAN

SEQ ID NO: 106 - protein, 7 aa, Artificial Sequence
  Description of Artificial Sequence: Synthetic peptide
  Anti-CD3-High-Int #1 - [anti-CD3]_H1.32_L1.47_scFv vlCDR2
GTNKRAP

SEQ ID NO: 107 - protein, 9 aa, Artificial Sequence
  Description of Artificial Sequence: Synthetic peptide
  Anti-CD3-High-Int #1 - [anti-CD3]_H1.32_L1.47_scFv vlCDR3
ALWYSNHWV

SEQ ID NO: 108 - protein, 20 aa, Artificial Sequence
  Description of Artificial Sequence: Synthetic peptide
  Anti-CD3-High-Int #1 - [anti-CD3]_H1.32_L1.47_scFv Linker
GKPGSGKPGSGKPGSGKPGS

SEQ ID NO: 109 - protein, 254 aa, Artificial Sequence
  Description of Artificial Sequence: Synthetic polypeptide
  Anti-CD3-High-Int #2 - [anti-CD3]_H1.89_L1.47_scFv scFv (VH-scFv linker-VL)
EVQLVESGGGLVQPGGSLRLSCAASGFTFSTYAMNWVRQAPGKGLEWVGRIRSKYNNYATYYADSVKGRFTISRDDSKNTLYLQMNSLRAEDTAVYYCVRHGNFGDEYVSWFAYWGQGTLVTVSSGKPGSGKPGSGKPGSGKPGSQAVVTQEPSLTVSPGGTVTLTCGSSTGAVTTSNYANWVQQKPGKSPRGLIGGTNKRAPGVPARFSGSLLGGKAALTISGAQPEDEADYYCALWYSNHWVFGGGTKLTVL

SEQ ID NO: 110 - protein, 254 aa, Artificial Sequence
  Description of Artificial Sequence: Synthetic polypeptide
  Anti-CD3-High-Int #2 - [anti-CD3]_H1.89_L1.47_scFv scFv (VL-scFv linker-VH)
QAVVTQEPSLTVSPGGTVTLTCGSSTGAVTTSNYANWVQQKPGKSPRGLIGGTNKRAPGVPARFSGSLLGGKAALTISGAQPEDEADYYCALWYSNHWVFGGGTKLTVLGKPGSGKPGSGKPGSGKPGSEVQLVESGGGLVQPGGSLRLSCAASGFTFSTYAMNWVRQAPGKGLEWVGRIRSKYNNYATYYADSVKGRFTISRDDSKNTLYLQMNSLRAEDTAVYYCVRHGNFGDEYVSWFAYWGQGTLVTVSS

SEQ ID NO: 111 - protein, 125 aa, Artificial Sequence
  Description of Artificial Sequence: Synthetic polypeptide
  Anti-CD3-High-Int #2 - [anti-CD3]_H1.89_L1.47_scFv Variable Heavy (vh) Domain
EVQLVESGGGLVQPGGSLRLSCAASGFTFSTYAMNWVRQAPGKGLEWVGRIRSKYNNYATYYADSVKGRFTISRDDSKNTLYLQMNSLRAEDTAVYYCVRHGNFGDEYVSWFAYWGQGTLVTVSS

SEQ ID NO: 112 - protein, 5 aa, Artificial Sequence
  Description of Artificial Sequence: Synthetic peptide
  Anti-CD3-High-Int #2 - [anti-CD3]_H1.89_L1.47_scFv vhCDR1
TYAMN

SEQ ID NO: 113 - protein, 19 aa, Artificial Sequence
  Description of Artificial Sequence: Synthetic peptide
  Anti-CD3-High-Int #2 - [anti-CD3]_H1.89_L1.47_scFv vhCDR2
RIRSKYNNYATYYADSVKG

SEQ ID NO: 114 - protein, 14 aa, Artificial Sequence
  Description of Artificial Sequence: Synthetic peptide
  Anti-CD3-High-Int #2 - [anti-CD3]_H1.89_L1.47_scFv vhCDR3
HGNFGDEYVSWFAY

SEQ ID NO: 115 - protein, 109 aa, Artificial Sequence; identical to SEQ ID NO: 93
  Description of Artificial Sequence: Synthetic polypeptide
  Anti-CD3-High-Int #2 - [anti-CD3]_H1.89_L1.47_scFv Variable Light (vl) Domain

SEQ ID NO: 116 - protein, 14 aa, Artificial Sequence
  Description of Artificial Sequence: Synthetic peptide
  Anti-CD3-High-Int #2 - [anti-CD3]_H1.89_L1.47_scFv vlCDR1
GSSTGAVTTSNYAN

SEQ ID NO: 117 - protein, 7 aa, Artificial Sequence
  Description of Artificial Sequence: Synthetic peptide
  Anti-CD3-High-Int #2 - [anti-CD3]_H1.89_L1.47_scFv vlCDR2
GTNKRAP

SEQ ID NO: 118 - protein, 9 aa, Artificial Sequence
  Description of Artificial Sequence: Synthetic peptide
  Anti-CD3-High-Int #2 - [anti-CD3]_H1.89_L1.47_scFv vlCDR3
ALWYSNHWV

SEQ ID NO: 119 - protein, 20 aa, Artificial Sequence
  Description of Artificial Sequence: Synthetic peptide
  Anti-CD3-High-Int #2 - [anti-CD3]_H1.89_L1.47_scFv Linker
GKPGSGKPGSGKPGSGKPGS

SEQ ID NO: 120 - protein, 254 aa, Artificial Sequence
  Description of Artificial Sequence: Synthetic polypeptide
  Anti-CD3-High-Int - [anti-CD3]_H1.90_L1.47_scFv scFv (VH-scFv linker-VL)
EVQLVESGGGLVQPGGSLRLSCAASGFTFSTYAMNWVRQAPGKGLEWVGRIRSKYNNYATYYADSVKGRFTISRDDSKNTLYLQMNSLRAEDTAVYYCVRHGNFGDPYVSWFAYWGQGTLVTVSSGKPGSGKPGSGKPGSGKPGSQAVVTQEPSLTVSPGGTVTLTCGSSTGAVTTSNYANWVQQKPGKSPRGLIGGTNKRAPGVPARFSGSLLGGKAALTISGAQPEDEADYYCALWYSNHWVFGGGTKLTVL

SEQ ID NO: 121 - protein, 254 aa, Artificial Sequence
  Description of Artificial Sequence: Synthetic polypeptide
  Anti-CD3-High-Int - [anti-CD3]_H1.90_L1.47_scFv scFv (VL-scFv linker-VH)
QAVVTQEPSLTVSPGGTVTLTCGSSTGAVTTSNYANWVQQKPGKSPRGLIGGTNKRAPGVPARFSGSLLGGKAALTISGAQPEDEADYYCALWYSNHWVFGGGTKLTVLGKPGSGKPGSGKPGSGKPGSEVQLVESGGGLVQPGGSLRLSCAASGFTFSTYAMNWVRQAPGKGLEWVGRIRSKYNNYATYYADSVKGRFTISRDDSKNTLYLQMNSLRAEDTAVYYCVRHGNFGDPYVSWFAYWGQGTLVTVSS

SEQ ID NO: 122 - protein, 125 aa, Artificial Sequence
  Description of Artificial Sequence: Synthetic polypeptide
  Anti-CD3-High-Int - [anti-CD3]_H1.90_L1.47_scFv Variable Heavy (vh) Domain
EVQLVESGGGLVQPGGSLRLSCAASGFTFSTYAMNWVRQAPGKGLEWVGRIRSKYNNYATYYADSVKGRFTISRDDSKNTLYLQMNSLRAEDTAVYYCVRHGNFGDPYVSWFAYWGQGTLVTVSS

SEQ ID NO: 123 - protein, 5 aa, Artificial Sequence
  Description of Artificial Sequence: Synthetic peptide
  Anti-CD3-High-Int - [anti-CD3]_H1.90_L1.47_scFv vhCDR1
TYAMN

SEQ ID NO: 124 - protein, 19 aa, Artificial Sequence
  Description of Artificial Sequence: Synthetic peptide
  Anti-CD3-High-Int - [anti-CD3]_H1.90_L1.47_scFv vhCDR2
RIRSKYNNYATYYADSVKG

SEQ ID NO: 125 - protein, 14 aa, Artificial Sequence
  Description of Artificial Sequence: Synthetic peptide
  Anti-CD3-High-Int - [anti-CD3]_H1.90_L1.47_scFv vhCDR3
HGNFGDPYVSWFAY

SEQ ID NO: 126 - protein, 109 aa, Artificial Sequence; identical to SEQ ID NO: 93
  Description of Artificial Sequence: Synthetic polypeptide
  Anti-CD3-High-Int - [anti-CD3]_H1.90_L1.47_scFv Variable Light (vl) Domain

SEQ ID NO: 127 - protein, 14 aa, Artificial Sequence
  Description of Artificial Sequence: Synthetic peptide
  Anti-CD3-High-Int - [anti-CD3]_H1.90_L1.47_scFv vlCDR1
GSSTGAVTTSNYAN

SEQ ID NO: 128 - protein, 7 aa, Artificial Sequence
  Description of Artificial Sequence: Synthetic peptide
  Anti-CD3-High-Int - [anti-CD3]_H1.90_L1.47_scFv vlCDR2
GTNKRAP

SEQ ID NO: 129 - protein, 9 aa, Artificial Sequence
  Description of Artificial Sequence: Synthetic peptide
  Anti-CD3-High-Int - [anti-CD3]_H1.90_L1.47_scFv vlCDR3
ALWYSNHWV

SEQ ID NO: 130 - protein, 20 aa, Artificial Sequence
  Description of Artificial Sequence: Synthetic peptide
  Anti-CD3-High-Int - [anti-CD3]_H1.90_L1.47_scFv Linker
GKPGSGKPGSGKPGSGKPGS

SEQ ID NO: 131 - protein, 254 aa, Artificial Sequence
  Description of Artificial Sequence: Synthetic polypeptide
  Anti-CD3-Intermediate - [anti-CD3]_H1.33_L1.47_scFv scFv (VH-scFv linker-VL)
EVQLVESGGGLVQPGGSLRLSCAASGFTFSTYAMNWVRQAPGKGLEWVGRIRSKYNNYATYYADSVKGRFTISRDDSKNTLYLQMNSLRAEDTAVYYCVRHGNFGDSYVSWFDYWGQGTLVTVSSGKPGSGKPGSGKPGSGKPGSQAVVTQEPSLTVSPGGTVTLTCGSSTGAVTTSNYANWVQQKPGKSPRGLIGGTNKRAPGVPARFSGSLLGGKAALTISGAQPEDEADYYCALWYSNHWVFGGGTKLTVL

SEQ ID NO: 132 - protein, 254 aa, Artificial Sequence
  Description of Artificial Sequence: Synthetic polypeptide
  Anti-CD3-Intermediate - [anti-CD3]_H1.33_L1.47_scFv scFv (VL-scFv linker-VH)
QAVVTQEPSLTVSPGGTVTLTCGSSTGAVTTSNYANWVQQKPGKSPRGLIGGTNKRAPGVPARFSGSLLGGKAALTISGAQPEDEADYYCALWYSNHWVFGGGTKLTVLGKPGSGKPGSGKPGSGKPGSEVQLVESGGGLVQPGGSLRLSCAASGFTFSTYAMNWVRQAPGKGLEWVGRIRSKYNNYATYYADSVKGRFTISRDDSKNTLYLQMNSLRAEDTAVYYCVRHGNFGDSYVSWFDYWGQGTLVTVSS

SEQ ID NO: 133 - protein, 125 aa, Artificial Sequence
  Description of Artificial Sequence: Synthetic polypeptide
  Anti-CD3-Intermediate - [anti-CD3]_H1.33_L1.47_scFv Variable Heavy (vh) Domain
EVQLVESGGGLVQPGGSLRLSCAASGFTFSTYAMNWVRQAPGKGLEWVGRIRSKYNNYATYYADSVKGRFTISRDDSKNTLYLQMNSLRAEDTAVYYCVRHGNFGDSYVSWFDYWGQGTLVTVSS

SEQ ID NO: 134 - protein, 5 aa, Artificial Sequence
  Description of Artificial Sequence: Synthetic peptide
  Anti-CD3-Intermediate - [anti-CD3]_H1.33_L1.47_scFv vhCDR1
TYAMN

SEQ ID NO: 135 - protein, 19 aa, Artificial Sequence
  Description of Artificial Sequence: Synthetic peptide
  Anti-CD3-Intermediate - [anti-CD3]_H1.33_L1.47_scFv vhCDR2
RIRSKYNNYATYYADSVKG

SEQ ID NO: 136 - protein, 14 aa, Artificial Sequence
  Description of Artificial Sequence: Synthetic peptide
  Anti-CD3-Intermediate - [anti-CD3]_H1.33_L1.47_scFv vhCDR3
HGNFGDSYVSWFDY

SEQ ID NO: 137 - protein, 109 aa, Artificial Sequence; identical to SEQ ID NO: 93
  Description of Artificial Sequence: Synthetic polypeptide
  Anti-CD3-Intermediate - [anti-CD3]_H1.33_L1.47_scFv Variable Light (vl) Domain

SEQ ID NO: 138 - protein, 14 aa, Artificial Sequence
  Description of Artificial Sequence: Synthetic peptide
  Anti-CD3-Intermediate - [anti-CD3]_H1.33_L1.47_scFv vlCDR1
GSSTGAVTTSNYAN

SEQ ID NO: 139 - protein, 7 aa, Artificial Sequence
  Description of Artificial Sequence: Synthetic peptide
  Anti-CD3-Intermediate - [anti-CD3]_H1.33_L1.47_scFv vlCDR2
GTNKRAP

SEQ ID NO: 140 - protein, 9 aa, Artificial Sequence
  Description of Artificial Sequence: Synthetic peptide
  Anti-CD3-Intermediate - [anti-CD3]_H1.33_L1.47_scFv vlCDR3
ALWYSNHWV

SEQ ID NO: 141 - protein, 20 aa, Artificial Sequence
  Description of Artificial Sequence: Synthetic peptide
  Anti-CD3-Intermediate - [anti-CD3]_H1.33_L1.47_scFv Linker
GKPGSGKPGSGKPGSGKPGS

SEQ ID NO: 142 - protein, 254 aa, Artificial Sequence
  Description of Artificial Sequence: Synthetic polypeptide
  Anti-CD3-High-Int - [anti-CD3]_H1.31_L1.47_scFv scFv (VH-scFv linker-VL)
EVQLVESGGGLVQPGGSLRLSCAASGFTFSTYAMSWVRQAPGKGLEWVGRIRSKYNNYATYYADSVKGRFTISRDDSKNTLYLQMNSLRAEDTAVYYCVRHGNFGDSYVSWFAYWGQGTLVTVSSGKPGSGKPGSGKPGSGKPGSQAVVTQEPSLTVSPGGTVTLTCGSSTGAVTTSNYANWVQQKPGKSPRGLIGGTNKRAPGVPARFSGSLLGGKAALTISGAQPEDEADYYCALWYSNHWVFGGGTKLTVL

SEQ ID NO: 143 - protein, 254 aa, Artificial Sequence
  Description of Artificial Sequence: Synthetic polypeptide
  Anti-CD3-High-Int - [anti-CD3]_H1.31_L1.47_scFv scFv (VL-scFv linker-VH)
QAVVTQEPSLTVSPGGTVTLTCGSSTGAVTTSNYANWVQQKPGKSPRGLIGGTNKRAPGVPARFSGSLLGGKAALTISGAQPEDEADYYCALWYSNHWVFGGGTKLTVLGKPGSGKPGSGKPGSGKPGSEVQLVESGGGLVQPGGSLRLSCAASGFTFSTYAMSWVRQAPGKGLEWVGRIRSKYNNYATYYADSVKGRFTISRDDSKNTLYLQMNSLRAEDTAVYYCVRHGNFGDSYVSWFAYWGQGTLVTVSS

SEQ ID NO: 144 - protein, 125 aa, Artificial Sequence
  Description of Artificial Sequence: Synthetic polypeptide
  Anti-CD3-High-Int - [anti-CD3]_H1.31_L1.47_scFv Variable Heavy (vh) Domain
EVQLVESGGGLVQPGGSLRLSCAASGFTFSTYAMSWVRQAPGKGLEWVGRIRSKYNNYATYYADSVKGRFTISRDDSKNTLYLQMNSLRAEDTAVYYCVRHGNFGDSYVSWFAYWGQGTLVTVSS

SEQ ID NO: 145 - protein, 5 aa, Artificial Sequence
  Description of Artificial Sequence: Synthetic peptide
  Anti-CD3-High-Int - [anti-CD3]_H1.31_L1.47_scFv vhCDR1
TYAMS

SEQ ID NO: 146 - protein, 19 aa, Artificial Sequence
  Description of Artificial Sequence: Synthetic peptide
  Anti-CD3-High-Int - [anti-CD3]_H1.31_L1.47_scFv vhCDR2
RIRSKYNNYATYYADSVKG

SEQ ID NO: 147 - protein, 14 aa, Artificial Sequence
  Description of Artificial Sequence: Synthetic peptide
  Anti-CD3-High-Int - [anti-CD3]_H1.31_L1.47_scFv vhCDR3
HGNFGDSYVSWFAY

SEQ ID NO: 148 - protein, 109 aa, Artificial Sequence; identical to SEQ ID NO: 93
  Description of Artificial Sequence: Synthetic polypeptide
  Anti-CD3-High-Int - [anti-CD3]_H1.31_L1.47_scFv Variable Light (vl) Domain

SEQ ID NO: 149 - protein, 14 aa, Artificial Sequence
  Description of Artificial Sequence: Synthetic peptide
  Anti-CD3-High-Int - [anti-CD3]_H1.31_L1.47_scFv vlCDR1
GSSTGAVTTSNYAN

SEQ ID NO: 150 - protein, 7 aa, Artificial Sequence
  Description of Artificial Sequence: Synthetic peptide
  Anti-CD3-High-Int - [anti-CD3]_H1.31_L1.47_scFv vlCDR2
GTNKRAP

SEQ ID NO: 151 - protein, 9 aa, Artificial Sequence
  Description of Artificial Sequence: Synthetic peptide
  Anti-CD3-High-Int - [anti-CD3]_H1.31_L1.47_scFv vlCDR3
ALWYSNHWV

SEQ ID NO: 152 - protein, 20 aa, Artificial Sequence
  Description of Artificial Sequence: Synthetic peptide
  Anti-CD3-High-Int - [anti-CD3]_H1.31_L1.47_scFv Linker
GKPGSGKPGSGKPGSGKPGS

SEQ ID NO: 153 - protein, 447 aa, Artificial Sequence
  Description of Artificial Sequence: Synthetic polypeptide
  XENP24645 Chain 1 - [alphaClaudin18.2]_H0_IgG1_pI(-)_ Isosteric_A_/PVA_/S267K/L368D/K370S
QVQLQQPGAELVRPGASVKLSCKASGYTFTSYWINWVKQRPGQGLEWIGNIYPSDSYTNYNQKFKDKATLTVDKSSSTAYMQLSSPTSEDSAVYYCTRSWRGNSFDYWGQGTTLTVSSASTKGPSVFPLAPSSKSTSGGTAALGCLVKDYFPEPVTVSWNSGALTSGVHTFPAVLQSSGLYSLSSVVTVPSSSLGTQTYICNVNHKPSDTKVDKKVEPKSCDKTHTCPPCPAPPVAGPSVFLFPPKPKDTLMISRTPEVTCVVVDVKHEDPEVKFNWYVDGVEVHNAKTKPREEEYNSTYRVVSVLTVLHQDWLNGKEYKCKVSNKALPAPIEKTISKAKGQPREPQVYTLPPSREEMTKNQVSLTCDVSGFYPSDIAVEWESDGQPENNYKTTPPVLDSDGSFFLYSKLTVDKSRWEQGDVFSCSVMHEALHNHYTQKSLSLSPGK

SEQ ID NO: 154 - protein, 485 aa, Artificial Sequence
  Description of Artificial Sequence: Synthetic polypeptide
  XENP24645 Chain 2 - [alphaCD3]_H1.30_L1.47_scFv(GKPGS)4_ Fc(216)_IgG1_C220S/PVA_/S267K/S364K/E357Q
EVQLVESGGGLVQPGGSLRLSCAASGFTFSTYAMNWVRQAPGKGLEWVGRIRSKYNNYATYYADSVKGRFTISRDDSKNTLYLQMNSLRAEDTAVYYCVRHGNFGDSYVSWFAYWGQGTLVTVSSGKPGSGKPGSGKPGSGKPGSQAVVTQEPSLTVSPGGTVTLTCGSSTGAVTTSNYANWVQQKPGKSPRGLIGGTNKRAPGVPARFSGSLLGGKAALTISGAQPEDEADYYCALWYSNHWVFGGGTKLTVLEPKSSDKTHTCPPCPAPPVAGPSVFLFPPKPKDTLMISRTPEVTCVVVDVKHEDPEVKFNWYVDGVEVHNAKTKPREEQYNSTYRVVSVLTVLHQDWLNGKEYKCKVSNKALPAPIEKTISKAKGQPREPQVYTLPPSREQMTKNQVKLTCLVKGFYPSDIAVEWESNGQPENNYKTTPPVLDSDGSFFLYSKLTVDKSRWQQGNVFSCSVMHEALHNHYTQKSLSLSPGK

SEQ ID NO: 155 - protein, 220 aa, Artificial Sequence; identical to SEQ ID NO: 86
  Description of Artificial Sequence: Synthetic polypeptide
  XENP24645 Chain 3 -  [alphaClaudin18.2]_L0

SEQ ID NO: 156 - protein, 447 aa, Artificial Sequence; identical to SEQ ID NO: 153
  Description of Artificial Sequence: Synthetic polypeptide
  XENP24646 Chain 1 -  [alphaClaudin18.2]_H0_IgG1_pI(-)_ Isosteric_A_/PVA_/S267K/L368D/K370S

SEQ ID NO: 157 - protein, 485 aa, Artificial Sequence
  Description of Artificial Sequence: Synthetic polypeptide
  XENP24646 Chain 2 -  [alphaCD3]_H1.32_L1.47_scFv(GKPGS)4_ Fc(216)_IgG1_C220S/PVA_/S267K/S364K/E357Q
EVQLVESGGGLVQPGGSLRLSCAASGFTFSTYAMNWVRQAPGKGLEWVGRIRSKANNYATYYADSVKGRFTISRDDSKNTLYLQMNSLRAEDTAVYYCVRHGNFGDSYVSWFAYWGQGTLVTVSSGKPGSGKPGSGKPGSGKPGSQAVVTQEPSLTVSPGGTVTLTCGSSTGAVTTSNYANWVQQKPGKSPRGLIGGTNKRAPGVPARFSGSLLGGKAALTISGAQPEDEADYYCALWYSNHWVFGGGTKLTVLEPKSSDKTHTCPPCPAPPVAGPSVFLFPPKPKDTLMISRTPEVTCVVVDVKHEDPEVKFNWYVDGVEVHNAKTKPREEQYNSTYRVVSVLTVLHQDWLNGKEYKCKVSNKALPAPIEKTISKAKGQPREPQVYTLPPSREQMTKNQVKLTCLVKGFYPSDIAVEWESNGQPENNYKTTPPVLDSDGSFFLYSKLTVDKSRWQQGNVFSCSVMHEALHNHYTQKSLSLSPGK

SEQ ID NO: 158 - protein, 220 aa, Artificial Sequence; identical to SEQ ID NO: 86
  Description of Artificial Sequence: Synthetic polypeptide
  XENP24646 Chain 3 -  [alphaClaudin18.2]_L0

SEQ ID NO: 159 - protein, 447 aa, Artificial Sequence; identical to SEQ ID NO: 153
  Description of Artificial Sequence: Synthetic polypeptide
  XENP24647 Chain 1 -  [alphaClaudin18.2]_H0_IgG1_ C220S/S364K/E357Q

SEQ ID NO: 160 - protein, 720 aa, Artificial Sequence
  Description of Artificial Sequence: Synthetic polypeptide
  XENP24647 Chain 2 -  [alphaClaudin18.2]_H0_(G4S)2_ [alphaCD3]_H1.30_L1.47_scFv(GKPGS)4_(G4S)2_IgG1_PVA _/S267K-pI(-)_Isosteric_A_L368D/K370S
QVQLQQPGAELVRPGASVKLSCKASGYTFTSYWINWVKQRPGQGLEWIGNIYPSDSYTNYNQKFKDKATLTVDKSSSTAYMQLSSPTSEDSAVYYCTRSWRGNSFDYWGQGTTLTVSSASTKGPSVFPLAPSSKSTSGGTAALGCLVKDYFPEPVTVSWNSGALTSGVHTFPAVLQSSGLYSLSSVVTVPSSSLGTQTYICNVNHKPSNTKVDKKVEPKSCGGGGSGGGGSEVQLVESGGGLVQPGGSLRLSCAASGFTFSTYAMNWVRQAPGKGLEWVGRIRSKYNNYATYYADSVKGRFTISRDDSKNTLYLQMNSLRAEDTAVYYCVRHGNFGDSYVSWFAYWGQGTLVTVSSGKPGSGKPGSGKPGSGKPGSQAVVTQEPSLTVSPGGTVTLTCGSSTGAVTTSNYANWVQQKPGKSPRGLIGGTNKRAPGVPARFSGSLLGGKAALTISGAQPEDEADYYCALWYSNHWVFGGGTKLTVLGGGGSGGGGSKTHTCPPCPAPPVAGPSVFLFPPKPKDTLMISRTPEVTCVVVDVKHEDPEVKFNWYVDGVEVHNAKTKPREEQYNSTYRVVSVLTVLHQDWLNGKEYKCKVSNKALPAPIEKTISKAKGQPREPQVYTLPPSREQMTKNQVKLTCLVKGFYPSDIAVEWESNGQPENNYKTTPPVLDSDGSFFLYSKLTVDKSRWQQGNVFSCSVMHEALHNHYTQKSLSLSPGK

SEQ ID NO: 161 - protein, 220 aa, Artificial Sequence; identical to SEQ ID NO: 86
  Description of Artificial Sequence: Synthetic polypeptide
  XENP24647 Chain 3 -  [alphaClaudin18.2]_L0

SEQ ID NO: 162 - protein, 447 aa, Artificial Sequence; identical to SEQ ID NO: 153
  Description of Artificial Sequence: Synthetic polypeptide
  XENP24648 Chain 1 -  [alphaClaudin18.2]_H0_IgG1_ C220S/S364K/E357Q

SEQ ID NO: 163 - protein, 720 aa, Artificial Sequence
  Description of Artificial Sequence: Synthetic polypeptide
  XENP24648 Chain 2 -  [alphaClaudin18.2]_H0_(GKPGS)2_ [alphaCD3]_H1.32_L1.47_scFv(GKPGS)4_(G4S)2_IgG1_PVA_ /S267K-pI(-)_Isosteric_A_L368D/K370S
QVQLQQPGAELVRPGASVKLSCKASGYTFTSYWINWVKQRPGQGLEWIGNIYPSDSYTNYNQKFKDKATLTVDKSSSTAYMQLSSPTSEDSAVYYCTRSWRGNSFDYWGQGTTLTVSSASTKGPSVFPLAPSSKSTSGGTAALGCLVKDYFPEPVTVSWNSGALTSGVHTFPAVLQSSGLYSLSSVVTVPSSSLGTQTYICNVNHKPSNTKVDKKVEPKSCGKPGSGKPGSEVQLVESGGGLVQPGGSLRLSCAASGFTFSTYAMNWVRQAPGKGLEWVGRIRSKANNYATYYADSVKGRFTISRDDSKNTLYLQMNSLRAEDTAVYYCVRHGNFGDSYVSWFAYWGQGTLVTVSSGKPGSGKPGSGKPGSGKPGSQAVVTQEPSLTVSPGGTVTLTCGSSTGAVTTSNYANWVQQKPGKSPRGLIGGTNKRAPGVPARFSGSLLGGKAALTISGAQPEDEADYYCALWYSNHWVFGGGTKLTVLGGGGSGGGGSKTHTCPPCPAPPVAGPSVFLFPPKPKDTLMISRTPEVTCVVVDVKHEDPEVKFNWYVDGVEVHNAKTKPREEQYNSTYRVVSVLTVLHQDWLNGKEYKCKVSNKALPAPIEKTISKAKGQPREPQVYTLPPSREQMTKNQVKLTCLVKGFYPSDIAVEWESNGQPENNYKTTPPVLDSDGSFFLYSKLTVDKSRWQQGNVFSCSVMHEALHNHYTQKSLSLSPGK

SEQ ID NO: 164 - protein, 220 aa, Artificial Sequence; identical to SEQ ID NO: 86
  Description of Artificial Sequence: Synthetic polypeptide
  XENP24648 Chain 3 -  [alphaClaudin18.2]_L0

SEQ ID NO: 165 - protein, 447 aa, Artificial Sequence; identical to SEQ ID NO: 153
  Description of Artificial Sequence: Synthetic polypeptide
  XENP31729 Chain 1 -  [alphaClaudin18.2]_H0_IgG1_ C220S/S364K/E357Q

SEQ ID NO: 166 - protein, 720 aa, Artificial Sequence
  Description of Artificial Sequence: Synthetic polypeptide
  XENP31729 Chain 2 -  [alphaClaudin18.2]_H0_(G4S)2_ [alphaCD3]_H1.32_L1.47_scFv(GKPGS)4_(G4S)2_IgG1_PVA _/S267K-pI(-)_Isosteric_A_L368D/K370S
QVQLQQPGAELVRPGASVKLSCKASGYTFTSYWINWVKQRPGQGLEWIGNIYPSDSYTNYNQKFKDKATLTVDKSSSTAYMQLSSPTSEDSAVYYCTRSWRGNSFDYWGQGTTLTVSSASTKGPSVFPLAPSSKSTSGGTAALGCLVKDYFPEPVTVSWNSGALTSGVHTFPAVLQSSGLYSLSSVVTVPSSSLGTQTYICNVNHKPSNTKVDKKVEPKSCGGGGSGGGGSEVQLVESGGGLVQPGGSLRLSCAASGFTFSTYAMNWVRQAPGKGLEWVGRIRSKANNYATYYADSVKGRFTISRDDSKNTLYLQMNSLRAEDTAVYYCVRHGNFGDSYVSWFAYWGQGTLVTVSSGKPGSGKPGSGKPGSGKPGSQAVVTQEPSLTVSPGGTVTLTCGSSTGAVTTSNYANWVQQKPGKSPRGLIGGTNKRAPGVPARFSGSLLGGKAALTISGAQPEDEADYYCALWYSNHWVFGGGTKLTVLGGGGSGGGGSKTHTCPPCPAPPVAGPSVFLFPPKPKDTLMISRTPEVTCVVVDVKHEDPEVKFNWYVDGVEVHNAKTKPREEQYNSTYRVVSVLTVLHQDWLNGKEYKCKVSNKALPAPIEKTISKAKGQPREPQVYTLPPSREQMTKNQVKLTCLVKGFYPSDIAVEWESNGQPENNYKTTPPVLDSDGSFFLYSKLTVDKSRWQQGNVFSCSVMHEALHNHYTQKSLSLSPGK

SEQ ID NO: 167 - protein, 220 aa, Artificial Sequence; identical to SEQ ID NO: 86
  Description of Artificial Sequence: Synthetic polypeptide
  XENP31729 Chain 3 -  [alphaClaudin18.2]_L0

SEQ ID NO: 168 - protein, 447 aa, Artificial Sequence; identical to SEQ ID NO: 153
  Description of Artificial Sequence: Synthetic polypeptide
  XENP24649 Chain 1 -  [alphaClaudin18.2]_H0_IgG1_ C220S/S364K/E357Q

SEQ ID NO: 169 - protein, 720 aa, Artificial Sequence
  Description of Artificial Sequence: Synthetic polypeptide
  XENP24649 Chain 2 -  [alphaClaudin18.2]_H0_(GKPGS)2_ [alphaCD3]_H1.33_L1.47_scFv(GKPGS)4_(G4S)2_IgG1_PVA_ /S267K-pI(-)_Isosteric_A_L368D/K370S
QVQLQQPGAELVRPGASVKLSCKASGYTFTSYWINWVKQRPGQGLEWIGNIYPSDSYTNYNQKFKDKATLTVDKSSSTAYMQLSSPTSEDSAVYYCTRSWRGNSFDYWGQGTTLTVSSASTKGPSVFPLAPSSKSTSGGTAALGCLVKDYFPEPVTVSWNSGALTSGVHTFPAVLQSSGLYSLSSVVTVPSSSLGTQTYICNVNHKPSNTKVDKKVEPKSCGKPGSGKPGSEVQLVESGGGLVQPGGSLRLSCAASGFTFSTYAMNWVRQAPGKGLEWVGRIRSKYNNYATYYADSVKGRFTISRDDSKNTLYLQMNSLRAEDTAVYYCVRHGNFGDSYVSWFDYWGQGTLVTVSSGKPGSGKPGSGKPGSGKPGSQAVVTQEPSLTVSPGGTVTLTCGSSTGAVTTSNYANWVQQKPGKSPRGLIGGTNKRAPGVPARFSGSLLGGKAALTISGAQPEDEADYYCALWYSNHWVFGGGTKLTVLGGGGSGGGGSKTHTCPPCPAPPVAGPSVFLFPPKPKDTLMISRTPEVTCVVVDVKHEDPEVKFNWYVDGVEVHNAKTKPREEQYNSTYRVVSVLTVLHQDWLNGKEYKCKVSNKALPAPIEKTISKAKGQPREPQVYTLPPSREQMTKNQVKLTCLVKGFYPSDIAVEWESNGQPENNYKTTPPVLDSDGSFFLYSKLTVDKSRWQQGNVFSCSVMHEALHNHYTQKSLSLSPGK

SEQ ID NO: 170 - protein, 220 aa, Artificial Sequence; identical to SEQ ID NO: 86
  Description of Artificial Sequence: Synthetic polypeptide
  XENP24649 Chain 3 -  [alphaClaudin18.2]_L0

SEQ ID NO: 171 - protein, 447 aa, Artificial Sequence; identical to SEQ ID NO: 153
  Description of Artificial Sequence: Synthetic polypeptide
  XENP24649v2 Chain 1 -  [alphaClaudin18.2]_H0_IgG1_ C220S/S364K/E357Q

SEQ ID NO: 172 - protein, 720 aa, Artificial Sequence
  Description of Artificial Sequence: Synthetic polypeptide
  XENP24649v2 Chain 2 -  [alphaClaudin18.2]_H0_(G4S)2_ [alphaCD3]_H1.33_L1.47_scFv(GKPGS)4_(G4S)2_IgG1_PVA_ /S267K-pI(-)_Isosteric_A_L368D/K370S
QVQLQQPGAELVRPGASVKLSCKASGYTFTSYWINWVKQRPGQGLEWIGNIYPSDSYTNYNQKFKDKATLTVDKSSSTAYMQLSSPTSEDSAVYYCTRSWRGNSFDYWGQGTTLTVSSASTKGPSVFPLAPSSKSTSGGTAALGCLVKDYFPEPVTVSWNSGALTSGVHTFPAVLQSSGLYSLSSVVTVPSSSLGTQTYICNVNHKPSNTKVDKKVEPKSCGGGGSGGGGSEVQLVESGGGLVQPGGSLRLSCAASGFTFSTYAMNWVRQAPGKGLEWVGRIRSKYNNYATYYADSVKGRFTISRDDSKNTLYLQMNSLRAEDTAVYYCVRHGNFGDSYVSWFDYWGQGTLVTVSSGKPGSGKPGSGKPGSGKPGSQAVVTQEPSLTVSPGGTVTLTCGSSTGAVTTSNYANWVQQKPGKSPRGLIGGTNKRAPGVPARFSGSLLGGKAALTISGAQPEDEADYYCALWYSNHWVFGGGTKLTVLGGGGSGGGGSKTHTCPPCPAPPVAGPSVFLFPPKPKDTLMISRTPEVTCVVVDVKHEDPEVKFNWYVDGVEVHNAKTKPREEQYNSTYRVVSVLTVLHQDWLNGKEYKCKVSNKALPAPIEKTISKAKGQPREPQVYTLPPSREQMTKNQVKLTCLVKGFYPSDIAVEWESNGQPENNYKTTPPVLDSDGSFFLYSKLTVDKSRWQQGNVFSCSVMHEALHNHYTQKSLSLSPGK

SEQ ID NO: 173 - protein, 220 aa, Artificial Sequence; identical to SEQ ID NO: 86
  Description of Artificial Sequence: Synthetic polypeptide
  XENP24649v2 Chain 3 -  [alphaClaudin18.2]_L0

SEQ ID NO: 174 - protein, 447 aa, Artificial Sequence; identical to SEQ ID NO: 153
  Description of Artificial Sequence: Synthetic polypeptide
  XENC10101 Chain 1 -  [alphaClaudin18.2]_H0_IgG1_ C220S/S364K/E357Q

SEQ ID NO: 175 - protein, 617 aa, Artificial Sequence
  Description of Artificial Sequence: Synthetic polypeptide
  XENC10101 Chain 2 -  [alphaClaudin18.2]_H0_(G4S)2_ [alphaCD3]_H1.89_L1.47_scFv(GKPGS)4_(G4S)2_IgG1_PVA_ /S267K-pI(-)_Isosteric_A_L368D/K370S
QVQLQQPGAELVRPGASVKLSCKASGYTFTSYWINWVKQRPGQGLEWIGNIYPSDSYTNYNQKFKDKATLTVDKSSSTAYMQLSSPTSEDSAVYYCTRSWRGNSFDYWGQGTTLTVSSGGGGSGGGGSEVQLVESGGGLVQPGGSLRLSCAASGFTFSTYAMNWVRQAPGKGLEWVGRIRSKYNNYATYYADSVKGRFTISRDDSKNTLYLQMNSLRAEDTAVYYCVRHGNFGDEYVSWFAYWGQGTLVTVSSGKPGSGKPGSGKPGSGKPGSQAVVTQEPSLTVSPGGTVTLTCGSSTGAVTTSNYANWVQQKPGKSPRGLIGGTNKRAPGVPARFSGSLLGGKAALTISGAQPEDEADYYCALWYSNHWVFGGGTKLTVLGGGGSGGGGSKTHTCPPCPAPPVAGPSVFLFPPKPKDTLMISRTPEVTCVVVDVKHEDPEVKFNWYVDGVEVHNAKTKPREEQYNSTYRVVSVLTVLHQDWLNGKEYKCKVSNKALPAPIEKTISKAKGQPREPQVYTLPPSREQMTKNQVKLTCLVKGFYPSDIAVEWESNGQPENNYKTTPPVLDSDGSFFLYSKLTVDKSRWQQGNVFSCSVMHEALHNHYTQKSLSLSPGK

SEQ ID NO: 176 - protein, 220 aa, Artificial Sequence; identical to SEQ ID NO: 86
  Description of Artificial Sequence: Synthetic polypeptide
  XENC10101 Chain 3 -  [alphaClaudin18.2]_L0

SEQ ID NO: 177 - protein, 447 aa, Artificial Sequence; identical to SEQ ID NO: 153
  Description of Artificial Sequence: Synthetic polypeptide
  XENC10102 Chain 1 -  [alphaClaudin18.2]_H0_IgG1_ C220S/S364K/E357Q

SEQ ID NO: 178 - protein, 617 aa, Artificial Sequence
  Description of Artificial Sequence: Synthetic polypeptide
  XENC10102 Chain 2 -  [alphaClaudin18.2]_H0_(G4S)2_ [alphaCD3]_H1.90_L1.47_scFv(GKPGS)4_(G4S)2_IgG1_PVA_ /S267K-pI(-)_Isosteric_A_L368D/K370S
QVQLQQPGAELVRPGASVKLSCKASGYTFTSYWINWVKQRPGQGLEWIGNIYPSDSYTNYNQKFKDKATLTVDKSSSTAYMQLSSPTSEDSAVYYCTRSWRGNSFDYWGQGTTLTVSSGGGGSGGGGSEVQLVESGGGLVQPGGSLRLSCAASGFTFSTYAMNWVRQAPGKGLEWVGRIRSKYNNYATYYADSVKGRFTISRDDSKNTLYLQMNSLRAEDTAVYYCVRHGNFGDPYVSWFAYWGQGTLVTVSSGKPGSGKPGSGKPGSGKPGSQAVVTQEPSLTVSPGGTVTLTCGSSTGAVTTSNYANWVQQKPGKSPRGLIGGTNKRAPGVPARFSGSLLGGKAALTISGAQPEDEADYYCALWYSNHWVFGGGTKLTVLGGGGSGGGGSKTHTCPPCPAPPVAGPSVFLFPPKPKDTLMISRTPEVTCVVVDVKHEDPEVKFNWYVDGVEVHNAKTKPREEQYNSTYRVVSVLTVLHQDWLNGKEYKCKVSNKALPAPIEKTISKAKGQPREPQVYTLPPSREQMTKNQVKLTCLVKGFYPSDIAVEWESNGQPENNYKTTPPVLDSDGSFFLYSKLTVDKSRWQQGNVFSCSVMHEALHNHYTQKSLSLSPGK

SEQ ID NO: 179 - protein, 220 aa, Artificial Sequence; identical to SEQ ID NO: 86
  Description of Artificial Sequence: Synthetic polypeptide
  XENC10102 Chain 3 -  [alphaClaudin18.2]_L0

SEQ ID NO: 180 - protein, 447 aa, Artificial Sequence; identical to SEQ ID NO: 153
  Description of Artificial Sequence: Synthetic polypeptide
  XENC10157 Chain 1 -  [alphaClaudin18.2]_H0_IgG1_ C220S/S364K/E357Q

SEQ ID NO: 181 - protein, 617 aa, Artificial Sequence
  Description of Artificial Sequence: Synthetic polypeptide
  XENC10157 Chain 2 -  [alphaClaudin18.2]_H0_(G4S)2_ [alphaCD3]_H1.31_L1.47_scFv(GKPGS)4_(G4S)2_IgG1_PVA_ /S267K-pI(-)_Isosteric_A_L368D/K370S
QVQLQQPGAELVRPGASVKLSCKASGYTFTSYWINWVKQRPGQGLEWIGNIYPSDSYTNYNQKFKDKATLTVDKSSSTAYMQLSSPTSEDSAVYYCTRSWRGNSFDYWGQGTTLTVSSGGGGSGGGGSEVQLVESGGGLVQPGGSLRLSCAASGFTFSTYAMSWVRQAPGKGLEWVGRIRSKYNNYATYYADSVKGRFTISRDDSKNTLYLQMNSLRAEDTAVYYCVRHGNFGDSYVSWFAYWGQGTLVTVSSGKPGSGKPGSGKPGSGKPGSQAVVTQEPSLTVSPGGTVTLTCGSSTGAVTTSNYANWVQQKPGKSPRGLIGGTNKRAPGVPARFSGSLLGGKAALTISGAQPEDEADYYCALWYSNHWVFGGGTKLTVLGGGGSGGGGSKTHTCPPCPAPPVAGPSVFLFPPKPKDTLMISRTPEVTCVVVDVKHEDPEVKFNWYVDGVEVHNAKTKPREEQYNSTYRVVSVLTVLHQDWLNGKEYKCKVSNKALPAPIEKTISKAKGQPREPQVYTLPPSREQMTKNQVKLTCLVKGFYPSDIAVEWESNGQPENNYKTTPPVLDSDGSFFLYSKLTVDKSRWQQGNVFSCSVMHEALHNHYTQKSLSLSPGK

SEQ ID NO: 182 - protein, 220 aa, Artificial Sequence; identical to SEQ ID NO: 86
  Description of Artificial Sequence: Synthetic polypeptide
  XENC10157 Chain 3 -  [alphaClaudin18.2]_L0

SEQ ID NO: 183 - protein, 447 aa, Artificial Sequence; identical to SEQ ID NO: 153
  Description of Artificial Sequence: Synthetic polypeptide
  XENP31723 Chain 1 -  [alphaClaudin18.2]_H0_IgG1_ C220S/S364K/E357Q

SEQ ID NO: 184 - protein, 617 aa, Artificial Sequence
  Description of Artificial Sequence: Synthetic polypeptide
  XENP31723 Chain 2 -  [alphaClaudin18.2]_H0_(G4S)2_ [alphaCD3] _L1.47_H1.30_scFv(GKPGS)4_(G4S)2_IgG1_PVA _/S267K-pI(-)_Isosteric_A_L368D/K370S
QVQLQQPGAELVRPGASVKLSCKASGYTFTSYWINWVKQRPGQGLEWIGNIYPSDSYTNYNQKFKDKATLTVDKSSSTAYMQLSSPTSEDSAVYYCTRSWRGNSFDYWGQGTTLTVSSGGGGSGGGGSQAVVTQEPSLTVSPGGTVTLTCGSSTGAVTTSNYANWVQQKPGKSPRGLIGGTNKRAPGVPARFSGSLLGGKAALTISGAQPEDEADYYCALWYSNHWVFGGGTKLTVLGKPGSGKPGSGKPGSGKPGSEVQLVESGGGLVQPGGSLRLSCAASGFTFSTYAMNWVRQAPGKGLEWVGRIRSKYNNYATYYADSVKGRFTISRDDSKNTLYLQMNSLRAEDTAVYYCVRHGNFGDSYVSWFAYWGQGTLVTVSSGGGGSGGGGSKTHTCPPCPAPPVAGPSVFLFPPKPKDTLMISRTPEVTCVVVDVKHEDPEVKFNWYVDGVEVHNAKTKPREEQYNSTYRVVSVLTVLHQDWLNGKEYKCKVSNKALPAPIEKTISKAKGQPREPQVYTLPPSREQMTKNQVKLTCLVKGFYPSDIAVEWESNGQPENNYKTTPPVLDSDGSFFLYSKLTVDKSRWQQGNVFSCSVMHEALHNHYTQKSLSLSPGK

SEQ ID NO: 185 - protein, 220 aa, Artificial Sequence; identical to SEQ ID NO: 86
  Description of Artificial Sequence: Synthetic polypeptide
  XENP31723 Chain 3 -  [alphaClaudin18.2]_L0

SEQ ID NO: 186 - protein, 447 aa, Artificial Sequence; identical to SEQ ID NO: 153
  Description of Artificial Sequence: Synthetic polypeptide
  XENP31725 Chain 1 -  [alphaClaudin18.2]_H0_IgG1_ C220S/S364K/E357Q

SEQ ID NO: 187 - protein, 617 aa, Artificial Sequence
  Description of Artificial Sequence: Synthetic polypeptide
  XENP31725 Chain 2 -  [alphaClaudin18.2]_H0_(G4S)2_ [alphaCD3] _L1.47_H1.32_scFv(GKPGS)4_(G4S)2_IgG1_PVA_ /S267K-pI(-)_Isosteric_A_L368D/K370S
QVQLQQPGAELVRPGASVKLSCKASGYTFTSYWINWVKQRPGQGLEWIGNIYPSDSYTNYNQKFKDKATLTVDKSSSTAYMQLSSPTSEDSAVYYCTRSWRGNSFDYWGQGTTLTVSSGGGGSGGGGSQAVVTQEPSLTVSPGGTVTLTCGSSTGAVTTSNYANWVQQKPGKSPRGLIGGTNKRAPGVPARFSGSLLGGKAALTISGAQPEDEADYYCALWYSNHWVFGGGTKLTVLGKPGSGKPGSGKPGSGKPGSEVQLVESGGGLVQPGGSLRLSCAASGFTFSTYAMNWVRQAPGKGLEWVGRIRSKANNYATYYADSVKGRFTISRDDSKNTLYLQMNSLRAEDTAVYYCVRHGNFGDSYVSWFAYWGQGTLVTVSSGGGGSGGGGSKTHTCPPCPAPPVAGPSVFLFPPKPKDTLMISRTPEVTCVVVDVKHEDPEVKFNWYVDGVEVHNAKTKPREEQYNSTYRVVSVLTVLHQDWLNGKEYKCKVSNKALPAPIEKTISKAKGQPREPQVYTLPPSREQMTKNQVKLTCLVKGFYPSDIAVEWESNGQPENNYKTTPPVLDSDGSFFLYSKLTVDKSRWQQGNVFSCSVMHEALHNHYTQKSLSLSPGK

SEQ ID NO: 188 - protein, 220 aa, Artificial Sequence; identical to SEQ ID NO: 86
  Description of Artificial Sequence: Synthetic polypeptide
  XENP31725 Chain 3 -  [alphaClaudin18.2]_L0

SEQ ID NO: 189 - protein, 447 aa, Artificial Sequence; identical to SEQ ID NO: 153
  Description of Artificial Sequence: Synthetic polypeptide
  XENP31727 Chain 1 -  [alphaClaudin18.2]_H0_IgG1_ C220S/S364K/E357Q

SEQ ID NO: 190 - protein, 617 aa, Artificial Sequence
  Description of Artificial Sequence: Synthetic polypeptide
  XENP31727 Chain 2 -  [alphaClaudin18.2]_H0_(G4S)2_ [alphaCD3] _L1.47_H1.89_scFv(GKPGS)4_(G4S)2_IgG1_PVA _/S267K-pI(-)_Isosteric_A_L368D/K370S
QVQLQQPGAELVRPGASVKLSCKASGYTFTSYWINWVKQRPGQGLEWIGNIYPSDSYTNYNQKFKDKATLTVDKSSSTAYMQLSSPTSEDSAVYYCTRSWRGNSFDYWGQGTTLTVSSGGGGSGGGGSQAVVTQEPSLTVSPGGTVTLTCGSSTGAVTTSNYANWVQQKPGKSPRGLIGGTNKRAPGVPARFSGSLLGGKAALTISGAQPEDEADYYCALWYSNHWVFGGGTKLTVLGKPGSGKPGSGKPGSGKPGSEVQLVESGGGLVQPGGSLRLSCAASGFTFSTYAMNWVRQAPGKGLEWVGRIRSKYNNYATYYADSVKGRFTISRDDSKNTLYLQMNSLRAEDTAVYYCVRHGNFGDEYVSWFAYWGQGTLVTVSSGGGGSGGGGSKTHTCPPCPAPPVAGPSVFLFPPKPKDTLMISRTPEVTCVVVDVKHEDPEVKFNWYVDGVEVHNAKTKPREEQYNSTYRVVSVLTVLHQDWLNGKEYKCKVSNKALPAPIEKTISKAKGQPREPQVYTLPPSREQMTKNQVKLTCLVKGFYPSDIAVEWESNGQPENNYKTTPPVLDSDGSFFLYSKLTVDKSRWQQGNVFSCSVMHEALHNHYTQKSLSLSPGK

SEQ ID NO: 191 - protein, 220 aa, Artificial Sequence; identical to SEQ ID NO: 86
  Description of Artificial Sequence: Synthetic polypeptide
  XENP31727 Chain 3 -  [alphaClaudin18.2]_L0

SEQ ID NO: 192 - protein, 447 aa, Artificial Sequence; identical to SEQ ID NO: 153
  Description of Artificial Sequence: Synthetic polypeptide
  XENC10103 Chain 1 -  [alphaClaudin18.2]_H0_IgG1_ C220S/S364K/E357Q

SEQ ID NO: 193 - protein, 617 aa, Artificial Sequence
  Description of Artificial Sequence: Synthetic polypeptide
  XENC10103 Chain 2 -  [alphaClaudin18.2]_H0_(G4S)2_ [alphaCD3] _L1.47_H1.90_scFv(GKPGS)4_(G4S)2_IgG1_PVA _/S267K-pI(-)_Isosteric_A_L368D/K370S
QVQLQQPGAELVRPGASVKLSCKASGYTFTSYWINWVKQRPGQGLEWIGNIYPSDSYTNYNQKFKDKATLTVDKSSSTAYMQLSSPTSEDSAVYYCTRSWRGNSFDYWGQGTTLTVSSGGGGSGGGGSQAVVTQEPSLTVSPGGTVTLTCGSSTGAVTTSNYANWVQQKPGKSPRGLIGGTNKRAPGVPARFSGSLLGGKAALTISGAQPEDEADYYCALWYSNHWVFGGGTKLTVLGKPGSGKPGSGKPGSGKPGSEVQLVESGGGLVQPGGSLRLSCAASGFTFSTYAMNWVRQAPGKGLEWVGRIRSKYNNYATYYADSVKGRFTISRDDSKNTLYLQMNSLRAEDTAVYYCVRHGNFGDPYVSWFAYWGQGTLVTVSSGGGGSGGGGSKTHTCPPCPAPPVAGPSVFLFPPKPKDTLMISRTPEVTCVVVDVKHEDPEVKFNWYVDGVEVHNAKTKPREEQYNSTYRVVSVLTVLHQDWLNGKEYKCKVSNKALPAPIEKTISKAKGQPREPQVYTLPPSREQMTKNQVKLTCLVKGFYPSDIAVEWESNGQPENNYKTTPPVLDSDGSFFLYSKLTVDKSRWQQGNVFSCSVMHEALHNHYTQKSLSLSPGK

SEQ ID NO: 194 - protein, 220 aa, Artificial Sequence; identical to SEQ ID NO: 86
  Description of Artificial Sequence: Synthetic polypeptide
  XENC10103 Chain 3 -  [alphaClaudin18.2]_L0

SEQ ID NO: 195 - protein, 447 aa, Artificial Sequence; identical to SEQ ID NO: 153
  Description of Artificial Sequence: Synthetic polypeptide
  XENC10104 Chain 1 -  [alphaClaudin18.2]_H0_IgG1_ C220S/S364K/E357Q

SEQ ID NO: 196 - protein, 617 aa, Artificial Sequence
  Description of Artificial Sequence: Synthetic polypeptide
  XENC10104 Chain 2 -  [alphaClaudin18.2]_H0_(G4S)2_ [alphaCD3] _L1.47_H1.33_scFv(GKPGS)4_(G4S)2_IgG1_PVA _/S267K-pI(-)_Isosteric_A_L368D/K370S
QVQLQQPGAELVRPGASVKLSCKASGYTFTSYWINWVKQRPGQGLEWIGNIYPSDSYTNYNQKFKDKATLTVDKSSSTAYMQLSSPTSEDSAVYYCTRSWRGNSFDYWGQGTTLTVSSGGGGSGGGGSQAVVTQEPSLTVSPGGTVTLTCGSSTGAVTTSNYANWVQQKPGKSPRGLIGGTNKRAPGVPARFSGSLLGGKAALTISGAQPEDEADYYCALWYSNHWVFGGGTKLTVLGKPGSGKPGSGKPGSGKPGSEVQLVESGGGLVQPGGSLRLSCAASGFTFSTYAMNWVRQAPGKGLEWVGRIRSKYNNYATYYADSVKGRFTISRDDSKNTLYLQMNSLRAEDTAVYYCVRHGNFGDSYVSWFDYWGQGTLVTVSSGGGGSGGGGSKTHTCPPCPAPPVAGPSVFLFPPKPKDTLMISRTPEVTCVVVDVKHEDPEVKFNWYVDGVEVHNAKTKPREEQYNSTYRVVSVLTVLHQDWLNGKEYKCKVSNKALPAPIEKTISKAKGQPREPQVYTLPPSREQMTKNQVKLTCLVKGFYPSDIAVEWESNGQPENNYKTTPPVLDSDGSFFLYSKLTVDKSRWQQGNVFSCSVMHEALHNHYTQKSLSLSPGK

SEQ ID NO: 197 - protein, 220 aa, Artificial Sequence; identical to SEQ ID NO: 86
  Description of Artificial Sequence: Synthetic polypeptide
  XENC10104 Chain 3 -  [alphaClaudin18.2]_L0

SEQ ID NO: 198 - protein, 447 aa, Artificial Sequence; identical to SEQ ID NO: 153
  Description of Artificial Sequence: Synthetic polypeptide
  XENC10105 Chain 1 -  [alphaClaudin18.2]_H0_IgG1_ C220S/S364K/E357Q

SEQ ID NO: 199 - protein, 617 aa, Artificial Sequence
  Description of Artificial Sequence: Synthetic polypeptide
  XENC10105 Chain 2 -  [alphaClaudin18.2]_H0_(G4S)2_ [alphaCD3] _L1.47_H1.31_scFv(GKPGS)4_(G4S)2_IgG1_PVA _/S267K-pI(-)_Isosteric_A_L368D/K370S
QVQLQQPGAELVRPGASVKLSCKASGYTFTSYWINWVKQRPGQGLEWIGNIYPSDSYTNYNQKFKDKATLTVDKSSSTAYMQLSSPTSEDSAVYYCTRSWRGNSFDYWGQGTTLTVSSGGGGSGGGGSQAVVTQEPSLTVSPGGTVTLTCGSSTGAVTTSNYANWVQQKPGKSPRGLIGGTNKRAPGVPARFSGSLLGGKAALTISGAQPEDEADYYCALWYSNHWVFGGGTKLTVLGKPGSGKPGSGKPGSGKPGSEVQLVESGGGLVQPGGSLRLSCAASGFTFSTYAMSWVRQAPGKGLEWVGRIRSKYNNYATYYADSVKGRFTISRDDSKNTLYLQMNSLRAEDTAVYYCVRHGNFGDSYVSWFAYWGQGTLVTVSSGGGGSGGGGSKTHTCPPCPAPPVAGPSVFLFPPKPKDTLMISRTPEVTCVVVDVKHEDPEVKFNWYVDGVEVHNAKTKPREEQYNSTYRVVSVLTVLHQDWLNGKEYKCKVSNKALPAPIEKTISKAKGQPREPQVYTLPPSREQMTKNQVKLTCLVKGFYPSDIAVEWESNGQPENNYKTTPPVLDSDGSFFLYSKLTVDKSRWQQGNVFSCSVMHEALHNHYTQKSLSLSPGK

SEQ ID NO: 200 - protein, 220 aa, Artificial Sequence; identical to SEQ ID NO: 86
  Description of Artificial Sequence: Synthetic polypeptide
  XENC10105 Chain 3 -  [alphaClaudin18.2]_L0

SEQ ID NO: 201 - protein, 447 aa, Artificial Sequence
  Description of Artificial Sequence: Synthetic polypeptide
  XENC10106 Chain 1 -  [alphaClaudin18.2]_H0_IgG1_ C220S/S364K/E357Q/M428L/N434S
QVQLQQPGAELVRPGASVKLSCKASGYTFTSYWINWVKQRPGQGLEWIGNIYPSDSYTNYNQKFKDKATLTVDKSSSTAYMQLSSPTSEDSAVYYCTRSWRGNSFDYWGQGTTLTVSSASTKGPSVFPLAPSSKSTSGGTAALGCLVKDYFPEPVTVSWNSGALTSGVHTFPAVLQSSGLYSLSSVVTVPSSSLGTQTYICNVNHKPSDTKVDKKVEPKSCDKTHTCPPCPAPPVAGPSVFLFPPKPKDTLMISRTPEVTCVVVDVKHEDPEVKFNWYVDGVEVHNAKTKPREEEYNSTYRVVSVLTVLHQDWLNGKEYKCKVSNKALPAPIEKTISKAKGQPREPQVYTLPPSREEMTKNQVSLTCDVSGFYPSDIAVEWESDGQPENNYKTTPPVLDSDGSFFLYSKLTVDKSRWEQGDVFSCSVLHEALHSHYTQKSLSLSPGK

SEQ ID NO: 202 - protein, 617 aa, Artificial Sequence
  Description of Artificial Sequence: Synthetic polypeptide
  XENC10106 Chain 2 -  [alphaClaudin18.2]_H0_(G4S)2_ [alphaCD3]_H1.30_L1.47_scFv(GKPGS)4_(G4S)2_IgG1_PVA _/S267K-pI(-)_Isosteric_A_L368D/K370S/M428L/N434S
QVQLQQPGAELVRPGASVKLSCKASGYTFTSYWINWVKQRPGQGLEWIGNIYPSDSYTNYNQKFKDKATLTVDKSSSTAYMQLSSPTSEDSAVYYCTRSWRGNSFDYWGQGTTLTVSSGGGGSGGGGSEVQLVESGGGLVQPGGSLRLSCAASGFTFSTYAMNWVRQAPGKGLEWVGRIRSKYNNYATYYADSVKGRFTISRDDSKNTLYLQMNSLRAEDTAVYYCVRHGNFGDSYVSWFAYWGQGTLVTVSSGKPGSGKPGSGKPGSGKPGSQAVVTQEPSLTVSPGGTVTLTCGSSTGAVTTSNYANWVQQKPGKSPRGLIGGTNKRAPGVPARFSGSLLGGKAALTISGAQPEDEADYYCALWYSNHWVFGGGTKLTVLGGGGSGGGGSKTHTCPPCPAPPVAGPSVFLFPPKPKDTLMISRTPEVTCVVVDVKHEDPEVKFNWYVDGVEVHNAKTKPREEQYNSTYRVVSVLTVLHQDWLNGKEYKCKVSNKALPAPIEKTISKAKGQPREPQVYTLPPSREQMTKNQVKLTCLVKGFYPSDIAVEWESNGQPENNYKTTPPVLDSDGSFFLYSKLTVDKSRWQQGNVFSCSVLHEALHSHYTQKSLSLSPGK

SEQ ID NO: 203 - protein, 220 aa, Artificial Sequence; identical to SEQ ID NO: 86
  Description of Artificial Sequence: Synthetic polypeptide
  XENC10106 Chain 3 -  [alphaClaudin18.2]_L0

SEQ ID NO: 204 - protein, 447 aa, Artificial Sequence; identical to SEQ ID NO: 201
  Description of Artificial Sequence: Synthetic polypeptide
  XENC10107 Chain 1 -  [alphaClaudin18.2]_H0_IgG1_ C220S/S364K/E357Q/M428L/N434S

SEQ ID NO: 205 - protein, 617 aa, Artificial Sequence
  Description of Artificial Sequence: Synthetic polypeptide
  XENC10107 Chain 2 -  [alphaClaudin18.2]_H0_(G4S)2_ [alphaCD3]_H1.32_L1.47_scFv(GKPGS)4_(G4S)2_IgG1_PVA _/S267K-pI(-)_Isosteric_A_L368D/K370S/M428L/N434S
QVQLQQPGAELVRPGASVKLSCKASGYTFTSYWINWVKQRPGQGLEWIGNIYPSDSYTNYNQKFKDKATLTVDKSSSTAYMQLSSPTSEDSAVYYCTRSWRGNSFDYWGQGTTLTVSSGGGGSGGGGSEVQLVESGGGLVQPGGSLRLSCAASGFTFSTYAMNWVRQAPGKGLEWVGRIRSKANNYATYYADSVKGRFTISRDDSKNTLYLQMNSLRAEDTAVYYCVRHGNFGDSYVSWFAYWGQGTLVTVSSGKPGSGKPGSGKPGSGKPGSQAVVTQEPSLTVSPGGTVTLTCGSSTGAVTTSNYANWVQQKPGKSPRGLIGGTNKRAPGVPARFSGSLLGGKAALTISGAQPEDEADYYCALWYSNHWVFGGGTKLTVLGGGGSGGGGSKTHTCPPCPAPPVAGPSVFLFPPKPKDTLMISRTPEVTCVVVDVKHEDPEVKFNWYVDGVEVHNAKTKPREEQYNSTYRVVSVLTVLHQDWLNGKEYKCKVSNKALPAPIEKTISKAKGQPREPQVYTLPPSREQMTKNQVKLTCLVKGFYPSDIAVEWESNGQPENNYKTTPPVLDSDGSFFLYSKLTVDKSRWQQGNVFSCSVLHEALHSHYTQKSLSLSPGK

SEQ ID NO: 206 - protein, 220 aa, Artificial Sequence; identical to SEQ ID NO: 86
  Description of Artificial Sequence: Synthetic polypeptide
  XENC10107 Chain 3 -  [alphaClaudin18.2]_L0

SEQ ID NO: 207 - protein, 447 aa, Artificial Sequence; identical to SEQ ID NO: 201
  Description of Artificial Sequence: Synthetic polypeptide
  XENC10108 Chain 1 -  [alphaClaudin18.2]_H0_IgG1_ C220S/S364K/E357Q/M428L/N434S

SEQ ID NO: 208 - protein, 617 aa, Artificial Sequence
  Description of Artificial Sequence: Synthetic polypeptide
  XENC10108 Chain 2 -  [alphaClaudin18.2]_H0_(G4S)2_ [alphaCD3]_H1.89_L1.47_scFv(GKPGS)4_(G4S)2_IgG1_PVA _/S267K-pI(-)_Isosteric_A_L368D/K370S/M428L/N434S
QVQLQQPGAELVRPGASVKLSCKASGYTFTSYWINWVKQRPGQGLEWIGNIYPSDSYTNYNQKFKDKATLTVDKSSSTAYMQLSSPTSEDSAVYYCTRSWRGNSFDYWGQGTTLTVSSGGGGSGGGGSEVQLVESGGGLVQPGGSLRLSCAASGFTFSTYAMNWVRQAPGKGLEWVGRIRSKYNNYATYYADSVKGRFTISRDDSKNTLYLQMNSLRAEDTAVYYCVRHGNFGDEYVSWFAYWGQGTLVTVSSGKPGSGKPGSGKPGSGKPGSQAVVTQEPSLTVSPGGTVTLTCGSSTGAVTTSNYANWVQQKPGKSPRGLIGGTNKRAPGVPARFSGSLLGGKAALTISGAQPEDEADYYCALWYSNHWVFGGGTKLTVLGGGGSGGGGSKTHTCPPCPAPPVAGPSVFLFPPKPKDTLMISRTPEVTCVVVDVKHEDPEVKFNWYVDGVEVHNAKTKPREEQYNSTYRVVSVLTVLHQDWLNGKEYKCKVSNKALPAPIEKTISKAKGQPREPQVYTLPPSREQMTKNQVKLTCLVKGFYPSDIAVEWESNGQPENNYKTTPPVLDSDGSFFLYSKLTVDKSRWQQGNVFSCSVLHEALHSHYTQKSLSLSPGK

SEQ ID NO: 209 - protein, 220 aa, Artificial Sequence; identical to SEQ ID NO: 86
  Description of Artificial Sequence: Synthetic polypeptide
  XENC10108 Chain 3 -  [alphaClaudin18.2]_L0

SEQ ID NO: 210 - protein, 447 aa, Artificial Sequence; identical to SEQ ID NO: 201
  Description of Artificial Sequence: Synthetic polypeptide
  XENC10109 Chain 1 -  [alphaClaudin18.2]_H0_IgG1_ C220S/S364K/E357Q/M428L/N434S

SEQ ID NO: 211 - protein, 617 aa, Artificial Sequence
  Description of Artificial Sequence: Synthetic polypeptide
  XENC10109 Chain 2 -  [alphaClaudin18.2]_H0_(G4S)2_ [alphaCD3]_H1.90_L1.47_scFv(GKPGS)4_(G4S)2_IgG1_PVA _/S267K-pI(-)_Isosteric_A_L368D/K370S/M428L/N434S
QVQLQQPGAELVRPGASVKLSCKASGYTFTSYWINWVKQRPGQGLEWIGNIYPSDSYTNYNQKFKDKATLTVDKSSSTAYMQLSSPTSEDSAVYYCTRSWRGNSFDYWGQGTTLTVSSGGGGSGGGGSEVQLVESGGGLVQPGGSLRLSCAASGFTFSTYAMNWVRQAPGKGLEWVGRIRSKYNNYATYYADSVKGRFTISRDDSKNTLYLQMNSLRAEDTAVYYCVRHGNFGDPYVSWFAYWGQGTLVTVSSGKPGSGKPGSGKPGSGKPGSQAVVTQEPSLTVSPGGTVTLTCGSSTGAVTTSNYANWVQQKPGKSPRGLIGGTNKRAPGVPARFSGSLLGGKAALTISGAQPEDEADYYCALWYSNHWVFGGGTKLTVLGGGGSGGGGSKTHTCPPCPAPPVAGPSVFLFPPKPKDTLMISRTPEVTCVVVDVKHEDPEVKFNWYVDGVEVHNAKTKPREEQYNSTYRVVSVLTVLHQDWLNGKEYKCKVSNKALPAPIEKTISKAKGQPREPQVYTLPPSREQMTKNQVKLTCLVKGFYPSDIAVEWESNGQPENNYKTTPPVLDSDGSFFLYSKLTVDKSRWQQGNVFSCSVLHEALHSHYTQKSLSLSPGK

SEQ ID NO: 212 - protein, 220 aa, Artificial Sequence; identical to SEQ ID NO: 86
  Description of Artificial Sequence: Synthetic polypeptide
  XENC10109 Chain 3 -  [alphaClaudin18.2]_L0

SEQ ID NO: 213 - protein, 447 aa, Artificial Sequence; identical to SEQ ID NO: 201
  Description of Artificial Sequence: Synthetic polypeptide
  XENC10110 Chain 1 -  [alphaClaudin18.2]_H0_IgG1_ C220S/S364K/E357Q/M428L/N434S

SEQ ID NO: 214 - protein, 617 aa, Artificial Sequence
  Description of Artificial Sequence: Synthetic polypeptide
  XENC10110 Chain 2 -  [alphaClaudin18.2]_H0_(G4S)2_ [alphaCD3]_H1.33_L1.47_scFv(GKPGS)4_(G4S)2_IgG1_PVA _/S267K-pI(-)_Isosteric_A_L368D/K370S/M428L/N434S
QVQLQQPGAELVRPGASVKLSCKASGYTFTSYWINWVKQRPGQGLEWIGNIYPSDSYTNYNQKFKDKATLTVDKSSSTAYMQLSSPTSEDSAVYYCTRSWRGNSFDYWGQGTTLTVSSGGGGSGGGGSEVQLVESGGGLVQPGGSLRLSCAASGFTFSTYAMNWVRQAPGKGLEWVGRIRSKYNNYATYYADSVKGRFTISRDDSKNTLYLQMNSLRAEDTAVYYCVRHGNFGDSYVSWFDYWGQGTLVTVSSGKPGSGKPGSGKPGSGKPGSQAVVTQEPSLTVSPGGTVTLTCGSSTGAVTTSNYANWVQQKPGKSPRGLIGGTNKRAPGVPARFSGSLLGGKAALTISGAQPEDEADYYCALWYSNHWVFGGGTKLTVLGGGGSGGGGSKTHTCPPCPAPPVAGPSVFLFPPKPKDTLMISRTPEVTCVVVDVKHEDPEVKFNWYVDGVEVHNAKTKPREEQYNSTYRVVSVLTVLHQDWLNGKEYKCKVSNKALPAPIEKTISKAKGQPREPQVYTLPPSREQMTKNQVKLTCLVKGFYPSDIAVEWESNGQPENNYKTTPPVLDSDGSFFLYSKLTVDKSRWQQGNVFSCSVLHEALHSHYTQKSLSLSPGK

SEQ ID NO: 215 - protein, 220 aa, Artificial Sequence; identical to SEQ ID NO: 86
  Description of Artificial Sequence: Synthetic polypeptide
  XENC10110 Chain 3 -  [alphaClaudin18.2]_L0

SEQ ID NO: 216 - protein, 447 aa, Artificial Sequence; identical to SEQ ID NO: 201
  Description of Artificial Sequence: Synthetic polypeptide
  XENC10111 Chain 1 -  [alphaClaudin18.2]_H0_IgG1_ C220S/S364K/E357Q/M428L/N434S

SEQ ID NO: 217 - protein, 617 aa, Artificial Sequence
  Description of Artificial Sequence: Synthetic polypeptide
  XENC10111 Chain 2 -  [alphaClaudin18.2]_H0_(G4S)2_ [alphaCD3]_H1.31_L1.47_scFv(GKPGS)4_(G4S)2_IgG1_PVA _/S267K-pI(-)_Isosteric_A_L368D/K370S/M428L/N434S
QVQLQQPGAELVRPGASVKLSCKASGYTFTSYWINWVKQRPGQGLEWIGNIYPSDSYTNYNQKFKDKATLTVDKSSSTAYMQLSSPTSEDSAVYYCTRSWRGNSFDYWGQGTTLTVSSGGGGSGGGGSEVQLVESGGGLVQPGGSLRLSCAASGFTFSTYAMSWVRQAPGKGLEWVGRIRSKYNNYATYYADSVKGRFTISRDDSKNTLYLQMNSLRAEDTAVYYCVRHGNFGDSYVSWFAYWGQGTLVTVSSGKPGSGKPGSGKPGSGKPGSQAVVTQEPSLTVSPGGTVTLTCGSSTGAVTTSNYANWVQQKPGKSPRGLIGGTNKRAPGVPARFSGSLLGGKAALTISGAQPEDEADYYCALWYSNHWVFGGGTKLTVLGGGGSGGGGSKTHTCPPCPAPPVAGPSVFLFPPKPKDTLMISRTPEVTCVVVDVKHEDPEVKFNWYVDGVEVHNAKTKPREEQYNSTYRVVSVLTVLHQDWLNGKEYKCKVSNKALPAPIEKTISKAKGQPREPQVYTLPPSREQMTKNQVKLTCLVKGFYPSDIAVEWESNGQPENNYKTTPPVLDSDGSFFLYSKLTVDKSRWQQGNVFSCSVLHEALHSHYTQKSLSLSPGK

SEQ ID NO: 218 - protein, 220 aa, Artificial Sequence; identical to SEQ ID NO: 86
  Description of Artificial Sequence: Synthetic polypeptide
  XENC10111 Chain 3 -  [alphaClaudin18.2]_L0

SEQ ID NO: 219 - protein, 447 aa, Artificial Sequence; identical to SEQ ID NO: 201
  Description of Artificial Sequence: Synthetic polypeptide
  XENC10112 Chain 1 -  [alphaClaudin18.2]_H0_IgG1_ C220S/S364K/E357Q/M428L/N434S

SEQ ID NO: 220 - protein, 617 aa, Artificial Sequence
  Description of Artificial Sequence: Synthetic polypeptide
  XENC10112 Chain 2 -  [alphaClaudin18.2]_H0_(G4S)2_ [alphaCD3] _L1.47_H1.30_scFv(GKPGS)4_(G4S)2_IgG1_PVA _/S267K-pI(-)_Isosteric_A_L368D/K370S/M428L/N434S
QVQLQQPGAELVRPGASVKLSCKASGYTFTSYWINWVKQRPGQGLEWIGNIYPSDSYTNYNQKFKDKATLTVDKSSSTAYMQLSSPTSEDSAVYYCTRSWRGNSFDYWGQGTTLTVSSGGGGSGGGGSQAVVTQEPSLTVSPGGTVTLTCGSSTGAVTTSNYANWVQQKPGKSPRGLIGGTNKRAPGVPARFSGSLLGGKAALTISGAQPEDEADYYCALWYSNHWVFGGGTKLTVLGKPGSGKPGSGKPGSGKPGSEVQLVESGGGLVQPGGSLRLSCAASGFTFSTYAMNWVRQAPGKGLEWVGRIRSKYNNYATYYADSVKGRFTISRDDSKNTLYLQMNSLRAEDTAVYYCVRHGNFGDSYVSWFAYWGQGTLVTVSSGGGGSGGGGSKTHTCPPCPAPPVAGPSVFLFPPKPKDTLMISRTPEVTCVVVDVKHEDPEVKFNWYVDGVEVHNAKTKPREEQYNSTYRVVSVLTVLHQDWLNGKEYKCKVSNKALPAPIEKTISKAKGQPREPQVYTLPPSREQMTKNQVKLTCLVKGFYPSDIAVEWESNGQPENNYKTTPPVLDSDGSFFLYSKLTVDKSRWQQGNVFSCSVLHEALHSHYTQKSLSLSPGK

SEQ ID NO: 221 - protein, 220 aa, Artificial Sequence; identical to SEQ ID NO: 86
  Description of Artificial Sequence: Synthetic polypeptide
  XENC10112 Chain 3 -  [alphaClaudin18.2]_L0

SEQ ID NO: 222 - protein, 447 aa, Artificial Sequence; identical to SEQ ID NO: 201
  Description of Artificial Sequence: Synthetic polypeptide
  XENC10113 Chain 1 -  [alphaClaudin18.2]_H0_IgG1_ C220S/S364K/E357Q/M428L/N434S

SEQ ID NO: 223 - protein, 617 aa, Artificial Sequence
  Description of Artificial Sequence: Synthetic polypeptide
  XENC10113 Chain 2 -  [alphaClaudin18.2]_H0_(G4S)2_ [alphaCD3] _L1.47_H1.32_scFv(GKPGS)4_(G4S)2_IgG1_PVA _/S267K-pI(-)_Isosteric_A_L368D/K370S/M428L/N434S
QVQLQQPGAELVRPGASVKLSCKASGYTFTSYWINWVKQRPGQGLEWIGNIYPSDSYTNYNQKFKDKATLTVDKSSSTAYMQLSSPTSEDSAVYYCTRSWRGNSFDYWGQGTTLTVSSGGGGSGGGGSQAVVTQEPSLTVSPGGTVTLTCGSSTGAVTTSNYANWVQQKPGKSPRGLIGGTNKRAPGVPARFSGSLLGGKAALTISGAQPEDEADYYCALWYSNHWVFGGGTKLTVLGKPGSGKPGSGKPGSGKPGSEVQLVESGGGLVQPGGSLRLSCAASGFTFSTYAMNWVRQAPGKGLEWVGRIRSKANNYATYYADSVKGRFTISRDDSKNTLYLQMNSLRAEDTAVYYCVRHGNFGDSYVSWFAYWGQGTLVTVSSGGGGSGGGGSKTHTCPPCPAPPVAGPSVFLFPPKPKDTLMISRTPEVTCVVVDVKHEDPEVKFNWYVDGVEVHNAKTKPREEQYNSTYRVVSVLTVLHQDWLNGKEYKCKVSNKALPAPIEKTISKAKGQPREPQVYTLPPSREQMTKNQVKLTCLVKGFYPSDIAVEWESNGQPENNYKTTPPVLDSDGSFFLYSKLTVDKSRWQQGNVFSCSVLHEALHSHYTQKSLSLSPGK

SEQ ID NO: 224 - protein, 220 aa, Artificial Sequence; identical to SEQ ID NO: 86
  Description of Artificial Sequence: Synthetic polypeptide
  XENC10113 Chain 3 -  [alphaClaudin18.2]_L0

SEQ ID NO: 225 - protein, 447 aa, Artificial Sequence; identical to SEQ ID NO: 201
  Description of Artificial Sequence: Synthetic polypeptide
  XENC10114 Chain 1 -  [alphaClaudin18.2]_H0_IgG1_ C220S/S364K/E357Q/M428L/N434S

SEQ ID NO: 226 - protein, 617 aa, Artificial Sequence
  Description of Artificial Sequence: Synthetic polypeptide
  XENC10114 Chain 2 -  [alphaClaudin18.2]_H0_(G4S)2_ [alphaCD3] _L1.47_H1.89_scFv(GKPGS)4_(G4S)2_IgG1_PVA _/S267K-pI(-)_Isosteric_A_L368D/K370S/M428L/N434S
QVQLQQPGAELVRPGASVKLSCKASGYTFTSYWINWVKQRPGQGLEWIGNIYPSDSYTNYNQKFKDKATLTVDKSSSTAYMQLSSPTSEDSAVYYCTRSWRGNSFDYWGQGTTLTVSSGGGGSGGGGSQAVVTQEPSLTVSPGGTVTLTCGSSTGAVTTSNYANWVQQKPGKSPRGLIGGTNKRAPGVPARFSGSLLGGKAALTISGAQPEDEADYYCALWYSNHWVFGGGTKLTVLGKPGSGKPGSGKPGSGKPGSEVQLVESGGGLVQPGGSLRLSCAASGFTFSTYAMNWVRQAPGKGLEWVGRIRSKYNNYATYYADSVKGRFTISRDDSKNTLYLQMNSLRAEDTAVYYCVRHGNFGDEYVSWFAYWGQGTLVTVSSGGGGSGGGGSKTHTCPPCPAPPVAGPSVFLFPPKPKDTLMISRTPEVTCVVVDVKHEDPEVKFNWYVDGVEVHNAKTKPREEQYNSTYRVVSVLTVLHQDWLNGKEYKCKVSNKALPAPIEKTISKAKGQPREPQVYTLPPSREQMTKNQVKLTCLVKGFYPSDIAVEWESNGQPENNYKTTPPVLDSDGSFFLYSKLTVDKSRWQQGNVFSCSVLHEALHSHYTQKSLSLSPGK

SEQ ID NO: 227 - protein, 220 aa, Artificial Sequence; identical to SEQ ID NO: 86
  Description of Artificial Sequence: Synthetic polypeptide
  XENC10114 Chain 3 -  [alphaClaudin18.2]_L0

SEQ ID NO: 228 - protein, 447 aa, Artificial Sequence; identical to SEQ ID NO: 201
  Description of Artificial Sequence: Synthetic polypeptide
  XENC10115 Chain 1 -  [alphaClaudin18.2]_H0_IgG1_ C220S/S364K/E357Q/M428L/N434S

SEQ ID NO: 229 - protein, 617 aa, Artificial Sequence
  Description of Artificial Sequence: Synthetic polypeptide
  XENC10115 Chain 2 -  [alphaClaudin18.2]_H0_(G4S)2_ [alphaCD3] _L1.47_H1.90_scFv(GKPGS)4_(G4S)2_IgG1_PVA _/S267K-pI(-)_Isosteric_A_L368D/K370S/M428L/N434S
QVQLQQPGAELVRPGASVKLSCKASGYTFTSYWINWVKQRPGQGLEWIGNIYPSDSYTNYNQKFKDKATLTVDKSSSTAYMQLSSPTSEDSAVYYCTRSWRGNSFDYWGQGTTLTVSSGGGGSGGGGSQAVVTQEPSLTVSPGGTVTLTCGSSTGAVTTSNYANWVQQKPGKSPRGLIGGTNKRAPGVPARFSGSLLGGKAALTISGAQPEDEADYYCALWYSNHWVFGGGTKLTVLGKPGSGKPGSGKPGSGKPGSEVQLVESGGGLVQPGGSLRLSCAASGFTFSTYAMNWVRQAPGKGLEWVGRIRSKYNNYATYYADSVKGRFTISRDDSKNTLYLQMNSLRAEDTAVYYCVRHGNFGDPYVSWFAYWGQGTLVTVSSGGGGSGGGGSKTHTCPPCPAPPVAGPSVFLFPPKPKDTLMISRTPEVTCVVVDVKHEDPEVKFNWYVDGVEVHNAKTKPREEQYNSTYRVVSVLTVLHQDWLNGKEYKCKVSNKALPAPIEKTISKAKGQPREPQVYTLPPSREQMTKNQVKLTCLVKGFYPSDIAVEWESNGQPENNYKTTPPVLDSDGSFFLYSKLTVDKSRWQQGNVFSCSVLHEALHSHYTQKSLSLSPGK

SEQ ID NO: 230 - protein, 220 aa, Artificial Sequence; identical to SEQ ID NO: 86
  Description of Artificial Sequence: Synthetic polypeptide
  XENC10115 Chain 3 -  [alphaClaudin18.2]_L0

SEQ ID NO: 231 - protein, 447 aa, Artificial Sequence; identical to SEQ ID NO: 201
  Description of Artificial Sequence: Synthetic polypeptide
  XENC10116 Chain 1 -  [alphaClaudin18.2]_H0_IgG1_ C220S/S364K/E357Q/M428L/N434S

SEQ ID NO: 232 - protein, 617 aa, Artificial Sequence
  Description of Artificial Sequence: Synthetic polypeptide
  XENC10116 Chain 2 -  [alphaClaudin18.2]_H0_(G4S)2_ [alphaCD3] _L1.47_H1.33_scFv(GKPGS)4_(G4S)2_IgG1_PVA _/S267K-pI(-)_Isosteric_A_L368D/K370S/M428L/N434S
QVQLQQPGAELVRPGASVKLSCKASGYTFTSYWINWVKQRPGQGLEWIGNIYPSDSYTNYNQKFKDKATLTVDKSSSTAYMQLSSPTSEDSAVYYCTRSWRGNSFDYWGQGTTLTVSSGGGGSGGGGSQAVVTQEPSLTVSPGGTVTLTCGSSTGAVTTSNYANWVQQKPGKSPRGLIGGTNKRAPGVPARFSGSLLGGKAALTISGAQPEDEADYYCALWYSNHWVFGGGTKLTVLGKPGSGKPGSGKPGSGKPGSEVQLVESGGGLVQPGGSLRLSCAASGFTFSTYAMNWVRQAPGKGLEWVGRIRSKYNNYATYYADSVKGRFTISRDDSKNTLYLQMNSLRAEDTAVYYCVRHGNFGDSYVSWFDYWGQGTLVTVSSGGGGSGGGGSKTHTCPPCPAPPVAGPSVFLFPPKPKDTLMISRTPEVTCVVVDVKHEDPEVKFNWYVDGVEVHNAKTKPREEQYNSTYRVVSVLTVLHQDWLNGKEYKCKVSNKALPAPIEKTISKAKGQPREPQVYTLPPSREQMTKNQVKLTCLVKGFYPSDIAVEWESNGQPENNYKTTPPVLDSDGSFFLYSKLTVDKSRWQQGNVFSCSVLHEALHSHYTQKSLSLSPGK

SEQ ID NO: 233 - protein, 220 aa, Artificial Sequence; identical to SEQ ID NO: 86
  Description of Artificial Sequence: Synthetic polypeptide
  XENC10116 Chain 3 -  [alphaClaudin18.2]_L0

SEQ ID NO: 234 - protein, 447 aa, Artificial Sequence; identical to SEQ ID NO: 201
  Description of Artificial Sequence: Synthetic polypeptide
  XENC10117 Chain 1 -  [alphaClaudin18.2]_H0_IgG1_ C220S/S364K/E357Q/M428L/N434S

SEQ ID NO: 235 - protein, 617 aa, Artificial Sequence
  Description of Artificial Sequence: Synthetic polypeptide
  XENC10117 Chain 2 -  [alphaClaudin18.2]_H0_(G4S)2_ [alphaCD3] _L1.47_H1.31_scFv(GKPGS)4_(G4S)2_IgG1_PVA _/S267K-pI(-)_Isosteric_A_L368D/K370S/M428L/N434S
QVQLQQPGAELVRPGASVKLSCKASGYTFTSYWINWVKQRPGQGLEWIGNIYPSDSYTNYNQKFKDKATLTVDKSSSTAYMQLSSPTSEDSAVYYCTRSWRGNSFDYWGQGTTLTVSSGGGGSGGGGSQAVVTQEPSLTVSPGGTVTLTCGSSTGAVTTSNYANWVQQKPGKSPRGLIGGTNKRAPGVPARFSGSLLGGKAALTISGAQPEDEADYYCALWYSNHWVFGGGTKLTVLGKPGSGKPGSGKPGSGKPGSEVQLVESGGGLVQPGGSLRLSCAASGFTFSTYAMSWVRQAPGKGLEWVGRIRSKYNNYATYYADSVKGRFTISRDDSKNTLYLQMNSLRAEDTAVYYCVRHGNFGDSYVSWFAYWGQGTLVTVSSGGGGSGGGGSKTHTCPPCPAPPVAGPSVFLFPPKPKDTLMISRTPEVTCVVVDVKHEDPEVKFNWYVDGVEVHNAKTKPREEQYNSTYRVVSVLTVLHQDWLNGKEYKCKVSNKALPAPIEKTISKAKGQPREPQVYTLPPSREQMTKNQVKLTCLVKGFYPSDIAVEWESNGQPENNYKTTPPVLDSDGSFFLYSKLTVDKSRWQQGNVFSCSVLHEALHSHYTQKSLSLSPGK

SEQ ID NO: 236 - protein, 220 aa, Artificial Sequence; identical to SEQ ID NO: 86
  Description of Artificial Sequence: Synthetic polypeptide
  XENC10117 Chain 3 -  [alphaClaudin18.2]_L0

SEQ ID NO: 237 - protein, 447 aa, Artificial Sequence
  Description of Artificial Sequence: Synthetic polypeptide
  XENC10118 Chain 1 -  [alphaClaudin18.2]_H1_IgG1_ C220S/S364K/E357Q
EVQLVQSGAEVKKPGESLRISCKASGYTFTSYWINWVRQMPGKGLEWMGNIYPSDSYTNYNQKFQGHVTISVDKSISTAYLQWSSLKASDTAMYYCTRSWRGNSFDYWGQGTLVTVSSASTKGPSVFPLAPSSKSTSGGTAALGCLVKDYFPEPVTVSWNSGALTSGVHTFPAVLQSSGLYSLSSVVTVPSSSLGTQTYICNVNHKPSDTKVDKKVEPKSCDKTHTCPPCPAPPVAGPSVFLFPPKPKDTLMISRTPEVTCVVVDVKHEDPEVKFNWYVDGVEVHNAKTKPREEEYNSTYRVVSVLTVLHQDWLNGKEYKCKVSNKALPAPIEKTISKAKGQPREPQVYTLPPSREEMTKNQVSLTCDVSGFYPSDIAVEWESDGQPENNYKTTPPVLDSDGSFFLYSKLTVDKSRWEQGDVFSCSVMHEALHNHYTQKSLSLSPGK

SEQ ID NO: 238 - protein, 617 aa, Artificial Sequence
  Description of Artificial Sequence: Synthetic polypeptide
  XENC10118 Chain 2 -  [alphaClaudin18.2]_H1_(G4S)2_ [alphaCD3]_H1.89_L1.47_scFv(GKPGS)4_(G4S)2_IgG1_PVA _/S267K-pI(-)_Isosteric_A_L368D/K370S
EVQLVQSGAEVKKPGESLRISCKASGYTFTSYWINWVRQMPGKGLEWMGNIYPSDSYTNYNQKFQGHVTISVDKSISTAYLQWSSLKASDTAMYYCTRSWRGNSFDYWGQGTLVTVSSGGGGSGGGGSEVQLVESGGGLVQPGGSLRLSCAASGFTFSTYAMNWVRQAPGKGLEWVGRIRSKYNNYATYYADSVKGRFTISRDDSKNTLYLQMNSLRAEDTAVYYCVRHGNFGDEYVSWFAYWGQGTLVTVSSGKPGSGKPGSGKPGSGKPGSQAVVTQEPSLTVSPGGTVTLTCGSSTGAVTTSNYANWVQQKPGKSPRGLIGGTNKRAPGVPARFSGSLLGGKAALTISGAQPEDEADYYCALWYSNHWVFGGGTKLTVLGGGGSGGGGSKTHTCPPCPAPPVAGPSVFLFPPKPKDTLMISRTPEVTCVVVDVKHEDPEVKFNWYVDGVEVHNAKTKPREEQYNSTYRVVSVLTVLHQDWLNGKEYKCKVSNKALPAPIEKTISKAKGQPREPQVYTLPPSREQMTKNQVKLTCLVKGFYPSDIAVEWESNGQPENNYKTTPPVLDSDGSFFLYSKLTVDKSRWQQGNVFSCSVMHEALHNHYTQKSLSLSPGK

SEQ ID NO: 239 - protein, 220 aa, Artificial Sequence
  Description of Artificial Sequence: Synthetic polypeptide
  XENC10118 Chain 3 -  [alphaClaudin18.2]_L1
DIVMTQSPDSLAVSLGERATINCKSSQSLLNSGNQKNYLTWYQQKPGQPPKLLIYWASTRESGVPDRFTGSGSGTDFTLTISSLQAEDVAVYYCQNDYSYPFTFGSGTKLEIKRTVAAPSVFIFPPSDEQLKSGTASVVCLLNNFYPREAKVQWKVDNALQSGNSQESVTEQDSKDSTYSLSSTLTLSKADYEKHKVYACEVTHQGLSSPVTKSFNRGEC

SEQ ID NO: 240 - protein, 447 aa, Artificial Sequence; identical to SEQ ID NO: 237
  Description of Artificial Sequence: Synthetic polypeptide
  XENC10119 Chain 1 -  [alphaClaudin18.2]_H1_IgG1_ C220S/S364K/E357Q

SEQ ID NO: 241 - protein, 617 aa, Artificial Sequence
  Description of Artificial Sequence: Synthetic polypeptide
  XENC10119 Chain 2 -  [alphaClaudin18.2]_H1_(G4S)2_ [alphaCD3]_H1.90_L1.47_scFv(GKPGS)4_(G4S)2_IgG1_PVA _/S267K-pI(-)_Isosteric_A_L368D/K370S
EVQLVQSGAEVKKPGESLRISCKASGYTFTSYWINWVRQMPGKGLEWMGNIYPSDSYTNYNQKFQGHVTISVDKSISTAYLQWSSLKASDTAMYYCTRSWRGNSFDYWGQGTLVTVSSGGGGSGGGGSEVQLVESGGGLVQPGGSLRLSCAASGFTFSTYAMNWVRQAPGKGLEWVGRIRSKYNNYATYYADSVKGRFTISRDDSKNTLYLQMNSLRAEDTAVYYCVRHGNFGDPYVSWFAYWGQGTLVTVSSGKPGSGKPGSGKPGSGKPGSQAVVTQEPSLTVSPGGTVTLTCGSSTGAVTTSNYANWVQQKPGKSPRGLIGGTNKRAPGVPARFSGSLLGGKAALTISGAQPEDEADYYCALWYSNHWVFGGGTKLTVLGGGGSGGGGSKTHTCPPCPAPPVAGPSVFLFPPKPKDTLMISRTPEVTCVVVDVKHEDPEVKFNWYVDGVEVHNAKTKPREEQYNSTYRVVSVLTVLHQDWLNGKEYKCKVSNKALPAPIEKTISKAKGQPREPQVYTLPPSREQMTKNQVKLTCLVKGFYPSDIAVEWESNGQPENNYKTTPPVLDSDGSFFLYSKLTVDKSRWQQGNVFSCSVMHEALHNHYTQKSLSLSPGK

SEQ ID NO: 242 - protein, 220 aa, Artificial Sequence; identical to SEQ ID NO: 239
  Description of Artificial Sequence: Synthetic polypeptide
  XENC10119 Chain 3 -  [alphaClaudin18.2]_L1

SEQ ID NO: 243 - protein, 447 aa, Artificial Sequence; identical to SEQ ID NO: 237
  Description of Artificial Sequence: Synthetic polypeptide
  XENC10120 Chain 1 -  [alphaClaudin18.2]_H1_IgG1_ C220S/S364K/E357Q

SEQ ID NO: 244 - protein, 617 aa, Artificial Sequence
  Description of Artificial Sequence: Synthetic polypeptide
  XENC10120 Chain 2 -  [alphaClaudin18.2]_H1_(G4S)2_ [alphaCD3]_H1.33_L1.47_scFv(GKPGS)4_(G4S)2_IgG1_PVA _/S267K-pI(-)_Isosteric_A_L368D/K370S
EVQLVQSGAEVKKPGESLRISCKASGYTFTSYWINWVRQMPGKGLEWMGNIYPSDSYTNYNQKFQGHVTISVDKSISTAYLQWSSLKASDTAMYYCTRSWRGNSFDYWGQGTLVTVSSGGGGSGGGGSEVQLVESGGGLVQPGGSLRLSCAASGFTFSTYAMNWVRQAPGKGLEWVGRIRSKYNNYATYYADSVKGRFTISRDDSKNTLYLQMNSLRAEDTAVYYCVRHGNFGDSYVSWFDYWGQGTLVTVSSGKPGSGKPGSGKPGSGKPGSQAVVTQEPSLTVSPGGTVTLTCGSSTGAVTTSNYANWVQQKPGKSPRGLIGGTNKRAPGVPARFSGSLLGGKAALTISGAQPEDEADYYCALWYSNHWVFGGGTKLTVLGGGGSGGGGSKTHTCPPCPAPPVAGPSVFLFPPKPKDTLMISRTPEVTCVVVDVKHEDPEVKFNWYVDGVEVHNAKTKPREEQYNSTYRVVSVLTVLHQDWLNGKEYKCKVSNKALPAPIEKTISKAKGQPREPQVYTLPPSREQMTKNQVKLTCLVKGFYPSDIAVEWESNGQPENNYKTTPPVLDSDGSFFLYSKLTVDKSRWQQGNVFSCSVMHEALHNHYTQKSLSLSPGK

SEQ ID NO: 245 - protein, 220 aa, Artificial Sequence; identical to SEQ ID NO: 239
  Description of Artificial Sequence: Synthetic polypeptide
  XENC10120 Chain 3 -  [alphaClaudin18.2]_L1

SEQ ID NO: 246 - protein, 447 aa, Artificial Sequence; identical to SEQ ID NO: 237
  Description of Artificial Sequence: Synthetic polypeptide
  XENC10121 Chain 1 -  [alphaClaudin18.2]_H1_IgG1_ C220S/S364K/E357Q

SEQ ID NO: 247 - protein, 617 aa, Artificial Sequence
  Description of Artificial Sequence: Synthetic polypeptide
  XENC10121 Chain 2 -  [alphaClaudin18.2]_H1_(G4S)2_ [alphaCD3]_H1.31_L1.47_scFv(GKPGS)4_(G4S)2_IgG1_PVA _/S267K-pI(-)_Isosteric_A_L368D/K370S
EVQLVQSGAEVKKPGESLRISCKASGYTFTSYWINWVRQMPGKGLEWMGNIYPSDSYTNYNQKFQGHVTISVDKSISTAYLQWSSLKASDTAMYYCTRSWRGNSFDYWGQGTLVTVSSGGGGSGGGGSEVQLVESGGGLVQPGGSLRLSCAASGFTFSTYAMSWVRQAPGKGLEWVGRIRSKYNNYATYYADSVKGRFTISRDDSKNTLYLQMNSLRAEDTAVYYCVRHGNFGDSYVSWFAYWGQGTLVTVSSGKPGSGKPGSGKPGSGKPGSQAVVTQEPSLTVSPGGTVTLTCGSSTGAVTTSNYANWVQQKPGKSPRGLIGGTNKRAPGVPARFSGSLLGGKAALTISGAQPEDEADYYCALWYSNHWVFGGGTKLTVLGGGGSGGGGSKTHTCPPCPAPPVAGPSVFLFPPKPKDTLMISRTPEVTCVVVDVKHEDPEVKFNWYVDGVEVHNAKTKPREEQYNSTYRVVSVLTVLHQDWLNGKEYKCKVSNKALPAPIEKTISKAKGQPREPQVYTLPPSREQMTKNQVKLTCLVKGFYPSDIAVEWESNGQPENNYKTTPPVLDSDGSFFLYSKLTVDKSRWQQGNVFSCSVMHEALHNHYTQKSLSLSPGK

SEQ ID NO: 248 - protein, 220 aa, Artificial Sequence; identical to SEQ ID NO: 239
  Description of Artificial Sequence: Synthetic polypeptide
  XENC10121 Chain 3 -  [alphaClaudin18.2]_L1

SEQ ID NO: 249 - protein, 447 aa, Artificial Sequence; identical to SEQ ID NO: 237
  Description of Artificial Sequence: Synthetic polypeptide
  XENP31724 Chain 1 -  [alphaClaudin18.2]_H1_IgG1_ C220S/S364K/E357Q

SEQ ID NO: 250 - protein, 617 aa, Artificial Sequence
  Description of Artificial Sequence: Synthetic polypeptide
  XENP31724 Chain 2 -  [alphaClaudin18.2]_H1_(G4S)2_ [alphaCD3] _L1.47_H1.30_scFv(GKPGS)4_(G4S)2_IgG1_PVA _/S267K-pI(-)_Isosteric_A_L368D/K370S
EVQLVQSGAEVKKPGESLRISCKASGYTFTSYWINWVRQMPGKGLEWMGNIYPSDSYTNYNQKFQGHVTISVDKSISTAYLQWSSLKASDTAMYYCTRSWRGNSFDYWGQGTLVTVSSGGGGSGGGGSQAVVTQEPSLTVSPGGTVTLTCGSSTGAVTTSNYANWVQQKPGKSPRGLIGGTNKRAPGVPARFSGSLLGGKAALTISGAQPEDEADYYCALWYSNHWVFGGGTKLTVLGKPGSGKPGSGKPGSGKPGSEVQLVESGGGLVQPGGSLRLSCAASGFTFSTYAMNWVRQAPGKGLEWVGRIRSKYNNYATYYADSVKGRFTISRDDSKNTLYLQMNSLRAEDTAVYYCVRHGNFGDSYVSWFAYWGQGTLVTVSSGGGGSGGGGSKTHTCPPCPAPPVAGPSVFLFPPKPKDTLMISRTPEVTCVVVDVKHEDPEVKFNWYVDGVEVHNAKTKPREEQYNSTYRVVSVLTVLHQDWLNGKEYKCKVSNKALPAPIEKTISKAKGQPREPQVYTLPPSREQMTKNQVKLTCLVKGFYPSDIAVEWESNGQPENNYKTTPPVLDSDGSFFLYSKLTVDKSRWQQGNVFSCSVMHEALHNHYTQKSLSLSPGK

SEQ ID NO: 251 - protein, 220 aa, Artificial Sequence; identical to SEQ ID NO: 239
  Description of Artificial Sequence: Synthetic polypeptide
  XENP31724 Chain 3 -  [alphaClaudin18.2]_L1

SEQ ID NO: 252 - protein, 447 aa, Artificial Sequence; identical to SEQ ID NO: 237
  Description of Artificial Sequence: Synthetic polypeptide
  XENP31726 Chain 1 -  [alphaClaudin18.2]_H1_IgG1_ C220S/S364K/E357Q

SEQ ID NO: 253 - protein, 617 aa, Artificial Sequence
  Description of Artificial Sequence: Synthetic polypeptide
  XENP31726 Chain 2 -  [alphaClaudin18.2]_H1_(G4S)2_ [alphaCD3] _L1.47_H1.32_scFv(GKPGS)4_(G4S)2_IgG1_PVA _/S267K-pI(-)_Isosteric_A_L368D/K370S
EVQLVQSGAEVKKPGESLRISCKASGYTFTSYWINWVRQMPGKGLEWMGNIYPSDSYTNYNQKFQGHVTISVDKSISTAYLQWSSLKASDTAMYYCTRSWRGNSFDYWGQGTLVTVSSGGGGSGGGGSQAVVTQEPSLTVSPGGTVTLTCGSSTGAVTTSNYANWVQQKPGKSPRGLIGGTNKRAPGVPARFSGSLLGGKAALTISGAQPEDEADYYCALWYSNHWVFGGGTKLTVLGKPGSGKPGSGKPGSGKPGSEVQLVESGGGLVQPGGSLRLSCAASGFTFSTYAMNWVRQAPGKGLEWVGRIRSKANNYATYYADSVKGRFTISRDDSKNTLYLQMNSLRAEDTAVYYCVRHGNFGDSYVSWFAYWGQGTLVTVSSGGGGSGGGGSKTHTCPPCPAPPVAGPSVFLFPPKPKDTLMISRTPEVTCVVVDVKHEDPEVKFNWYVDGVEVHNAKTKPREEQYNSTYRVVSVLTVLHQDWLNGKEYKCKVSNKALPAPIEKTISKAKGQPREPQVYTLPPSREQMTKNQVKLTCLVKGFYPSDIAVEWESNGQPENNYKTTPPVLDSDGSFFLYSKLTVDKSRWQQGNVFSCSVMHEALHNHYTQKSLSLSPGK

SEQ ID NO: 254 - protein, 220 aa, Artificial Sequence; identical to SEQ ID NO: 239
  Description of Artificial Sequence: Synthetic polypeptide
  XENP31726 Chain 3 -  [alphaClaudin18.2]_L1

SEQ ID NO: 255 - protein, 447 aa, Artificial Sequence; identical to SEQ ID NO: 237
  Description of Artificial Sequence: Synthetic polypeptide
  XENP31728 Chain 1 -  [alphaClaudin18.2]_H1_IgG1_ C220S/S364K/E357Q

SEQ ID NO: 256 - protein, 617 aa, Artificial Sequence
  Description of Artificial Sequence: Synthetic polypeptide
  XENP31728 Chain 2 -  [alphaClaudin18.2]_H1_(G4S)2_ [alphaCD3] _L1.47_H1.89_scFv(GKPGS)4_(G4S)2_IgG1_PVA _/S267K-pI(-)_Isosteric_A_L368D/K370S
EVQLVQSGAEVKKPGESLRISCKASGYTFTSYWINWVRQMPGKGLEWMGNIYPSDSYTNYNQKFQGHVTISVDKSISTAYLQWSSLKASDTAMYYCTRSWRGNSFDYWGQGTLVTVSSGGGGSGGGGSQAVVTQEPSLTVSPGGTVTLTCGSSTGAVTTSNYANWVQQKPGKSPRGLIGGTNKRAPGVPARFSGSLLGGKAALTISGAQPEDEADYYCALWYSNHWVFGGGTKLTVLGKPGSGKPGSGKPGSGKPGSEVQLVESGGGLVQPGGSLRLSCAASGFTFSTYAMNWVRQAPGKGLEWVGRIRSKYNNYATYYADSVKGRFTISRDDSKNTLYLQMNSLRAEDTAVYYCVRHGNFGDEYVSWFAYWGQGTLVTVSSGGGGSGGGGSKTHTCPPCPAPPVAGPSVFLFPPKPKDTLMISRTPEVTCVVVDVKHEDPEVKFNWYVDGVEVHNAKTKPREEQYNSTYRVVSVLTVLHQDWLNGKEYKCKVSNKALPAPIEKTISKAKGQPREPQVYTLPPSREQMTKNQVKLTCLVKGFYPSDIAVEWESNGQPENNYKTTPPVLDSDGSFFLYSKLTVDKSRWQQGNVFSCSVMHEALHNHYTQKSLSLSPGK

SEQ ID NO: 257 - protein, 220 aa, Artificial Sequence; identical to SEQ ID NO: 239
  Description of Artificial Sequence: Synthetic polypeptide
  XENP31728 Chain 3 -  [alphaClaudin18.2]_L1

SEQ ID NO: 258 - protein, 447 aa, Artificial Sequence; identical to SEQ ID NO: 237
  Description of Artificial Sequence: Synthetic polypeptide
  XENC10121 Chain 1 -  [alphaClaudin18.2]_H1_IgG1_ C220S/S364K/E357Q

SEQ ID NO: 259 - protein, 617 aa, Artificial Sequence
  Description of Artificial Sequence: Synthetic polypeptide
  XENC10121 Chain 2 -  [alphaClaudin18.2]_H1_(G4S)2_ [alphaCD3] _L1.47_H1.90_scFv(GKPGS)4_(G4S)2_IgG1_PVA _/S267K-pI(-)_Isosteric_A_L368D/K370S
EVQLVQSGAEVKKPGESLRISCKASGYTFTSYWINWVRQMPGKGLEWMGNIYPSDSYTNYNQKFQGHVTISVDKSISTAYLQWSSLKASDTAMYYCTRSWRGNSFDYWGQGTLVTVSSGGGGSGGGGSQAVVTQEPSLTVSPGGTVTLTCGSSTGAVTTSNYANWVQQKPGKSPRGLIGGTNKRAPGVPARFSGSLLGGKAALTISGAQPEDEADYYCALWYSNHWVFGGGTKLTVLGKPGSGKPGSGKPGSGKPGSEVQLVESGGGLVQPGGSLRLSCAASGFTFSTYAMNWVRQAPGKGLEWVGRIRSKYNNYATYYADSVKGRFTISRDDSKNTLYLQMNSLRAEDTAVYYCVRHGNFGDPYVSWFAYWGQGTLVTVSSGGGGSGGGGSKTHTCPPCPAPPVAGPSVFLFPPKPKDTLMISRTPEVTCVVVDVKHEDPEVKFNWYVDGVEVHNAKTKPREEQYNSTYRVVSVLTVLHQDWLNGKEYKCKVSNKALPAPIEKTISKAKGQPREPQVYTLPPSREQMTKNQVKLTCLVKGFYPSDIAVEWESNGQPENNYKTTPPVLDSDGSFFLYSKLTVDKSRWQQGNVFSCSVMHEALHNHYTQKSLSLSPGK

SEQ ID NO: 260 - protein, 220 aa, Artificial Sequence; identical to SEQ ID NO: 239
  Description of Artificial Sequence: Synthetic polypeptide
  XENC10121 Chain 3 -  [alphaClaudin18.2]_L1

SEQ ID NO: 261 - protein, 447 aa, Artificial Sequence; identical to SEQ ID NO: 237
  Description of Artificial Sequence: Synthetic polypeptide
  XENC10122 Chain 1 -  [alphaClaudin18.2]_H1_IgG1_ C220S/S364K/E357Q

SEQ ID NO: 262 - protein, 617 aa, Artificial Sequence
  Description of Artificial Sequence: Synthetic polypeptide
  XENC10122 Chain 2 -  [alphaClaudin18.2]_H1_(G4S)2_ [alphaCD3] _L1.47_H1.33_scFv(GKPGS)4_(G4S)2_IgG1_PVA _/S267K-pI(-)_Isosteric_A_L368D/K370S
EVQLVQSGAEVKKPGESLRISCKASGYTFTSYWINWVRQMPGKGLEWMGNIYPSDSYTNYNQKFQGHVTISVDKSISTAYLQWSSLKASDTAMYYCTRSWRGNSFDYWGQGTLVTVSSGGGGSGGGGSQAVVTQEPSLTVSPGGTVTLTCGSSTGAVTTSNYANWVQQKPGKSPRGLIGGTNKRAPGVPARFSGSLLGGKAALTISGAQPEDEADYYCALWYSNHWVFGGGTKLTVLGKPGSGKPGSGKPGSGKPGSEVQLVESGGGLVQPGGSLRLSCAASGFTFSTYAMNWVRQAPGKGLEWVGRIRSKYNNYATYYADSVKGRFTISRDDSKNTLYLQMNSLRAEDTAVYYCVRHGNFGDSYVSWFDYWGQGTLVTVSSGGGGSGGGGSKTHTCPPCPAPPVAGPSVFLFPPKPKDTLMISRTPEVTCVVVDVKHEDPEVKFNWYVDGVEVHNAKTKPREEQYNSTYRVVSVLTVLHQDWLNGKEYKCKVSNKALPAPIEKTISKAKGQPREPQVYTLPPSREQMTKNQVKLTCLVKGFYPSDIAVEWESNGQPENNYKTTPPVLDSDGSFFLYSKLTVDKSRWQQGNVFSCSVMHEALHNHYTQKSLSLSPGK

SEQ ID NO: 263 - protein, 220 aa, Artificial Sequence; identical to SEQ ID NO: 239
  Description of Artificial Sequence: Synthetic polypeptide
  XENC10122 Chain 3 -  [alphaClaudin18.2]_L1

SEQ ID NO: 264 - protein, 447 aa, Artificial Sequence; identical to SEQ ID NO: 237
  Description of Artificial Sequence: Synthetic polypeptide
  XENC10123 Chain 1 -  [alphaClaudin18.2]_H1_IgG1_ C220S/S364K/E357Q

SEQ ID NO: 265 - protein, 617 aa, Artificial Sequence
  Description of Artificial Sequence: Synthetic polypeptide
  XENC10123 Chain 2 -  [alphaClaudin18.2]_H1_(G4S)2_ [alphaCD3] _L1.47_H1.31_scFv(GKPGS)4_(G4S)2_IgG1_PVA _/S267K-pI(-)_Isosteric_A_L368D/K370S
EVQLVQSGAEVKKPGESLRISCKASGYTFTSYWINWVRQMPGKGLEWMGNIYPSDSYTNYNQKFQGHVTISVDKSISTAYLQWSSLKASDTAMYYCTRSWRGNSFDYWGQGTLVTVSSGGGGSGGGGSQAVVTQEPSLTVSPGGTVTLTCGSSTGAVTTSNYANWVQQKPGKSPRGLIGGTNKRAPGVPARFSGSLLGGKAALTISGAQPEDEADYYCALWYSNHWVFGGGTKLTVLGKPGSGKPGSGKPGSGKPGSEVQLVESGGGLVQPGGSLRLSCAASGFTFSTYAMSWVRQAPGKGLEWVGRIRSKYNNYATYYADSVKGRFTISRDDSKNTLYLQMNSLRAEDTAVYYCVRHGNFGDSYVSWFAYWGQGTLVTVSSGGGGSGGGGSKTHTCPPCPAPPVAGPSVFLFPPKPKDTLMISRTPEVTCVVVDVKHEDPEVKFNWYVDGVEVHNAKTKPREEQYNSTYRVVSVLTVLHQDWLNGKEYKCKVSNKALPAPIEKTISKAKGQPREPQVYTLPPSREQMTKNQVKLTCLVKGFYPSDIAVEWESNGQPENNYKTTPPVLDSDGSFFLYSKLTVDKSRWQQGNVFSCSVMHEALHNHYTQKSLSLSPGK

SEQ ID NO: 266 - protein, 220 aa, Artificial Sequence; identical to SEQ ID NO: 239
  Description of Artificial Sequence: Synthetic polypeptide
  XENC10123 Chain 3 -  [alphaClaudin18.2]_L1

SEQ ID NO: 267 - protein, 447 aa, Artificial Sequence
  Description of Artificial Sequence: Synthetic polypeptide
  XENC10124 Chain 1 -  [alphaClaudin18.2]_H1_IgG1_ C220S/S364K/E357Q/M428L/N434S
EVQLVQSGAEVKKPGESLRISCKASGYTFTSYWINWVRQMPGKGLEWMGNIYPSDSYTNYNQKFQGHVTISVDKSISTAYLQWSSLKASDTAMYYCTRSWRGNSFDYWGQGTLVTVSSASTKGPSVFPLAPSSKSTSGGTAALGCLVKDYFPEPVTVSWNSGALTSGVHTFPAVLQSSGLYSLSSVVTVPSSSLGTQTYICNVNHKPSDTKVDKKVEPKSCDKTHTCPPCPAPPVAGPSVFLFPPKPKDTLMISRTPEVTCVVVDVKHEDPEVKFNWYVDGVEVHNAKTKPREEEYNSTYRVVSVLTVLHQDWLNGKEYKCKVSNKALPAPIEKTISKAKGQPREPQVYTLPPSREEMTKNQVSLTCDVSGFYPSDIAVEWESDGQPENNYKTTPPVLDSDGSFFLYSKLTVDKSRWEQGDVFSCSVLHEALHSHYTQKSLSLSPGK

SEQ ID NO: 268 - protein, 617 aa, Artificial Sequence
  Description of Artificial Sequence: Synthetic polypeptide
  XENC10124 Chain 2 -  [alphaClaudin18.2]_H1_(G4S)2_ [alphaCD3]_H1.30_L1.47_scFv(GKPGS)4_(G4S)2_IgG1_PVA _/S267K-pI(-)_Isosteric_A_L368D/K370S/M428L/N434S
EVQLVQSGAEVKKPGESLRISCKASGYTFTSYWINWVRQMPGKGLEWMGNIYPSDSYTNYNQKFQGHVTISVDKSISTAYLQWSSLKASDTAMYYCTRSWRGNSFDYWGQGTLVTVSSGGGGSGGGGSEVQLVESGGGLVQPGGSLRLSCAASGFTFSTYAMNWVRQAPGKGLEWVGRIRSKYNNYATYYADSVKGRFTISRDDSKNTLYLQMNSLRAEDTAVYYCVRHGNFGDSYVSWFAYWGQGTLVTVSSGKPGSGKPGSGKPGSGKPGSQAVVTQEPSLTVSPGGTVTLTCGSSTGAVTTSNYANWVQQKPGKSPRGLIGGTNKRAPGVPARFSGSLLGGKAALTISGAQPEDEADYYCALWYSNHWVFGGGTKLTVLGGGGSGGGGSKTHTCPPCPAPPVAGPSVFLFPPKPKDTLMISRTPEVTCVVVDVKHEDPEVKFNWYVDGVEVHNAKTKPREEQYNSTYRVVSVLTVLHQDWLNGKEYKCKVSNKALPAPIEKTISKAKGQPREPQVYTLPPSREQMTKNQVKLTCLVKGFYPSDIAVEWESNGQPENNYKTTPPVLDSDGSFFLYSKLTVDKSRWQQGNVFSCSVLHEALHSHYTQKSLSLSPGK

SEQ ID NO: 269 - protein, 220 aa, Artificial Sequence; identical to SEQ ID NO: 239
  Description of Artificial Sequence: Synthetic polypeptide
  XENC10124 Chain 3 -  [alphaClaudin18.2]_L1

SEQ ID NO: 270 - protein, 447 aa, Artificial Sequence; identical to SEQ ID NO: 267
  Description of Artificial Sequence: Synthetic polypeptide
  XENC10125 Chain 1 -  [alphaClaudin18.2]_H1_IgG1_ C220S/S364K/E357Q/M428L/N434S

SEQ ID NO: 271 - protein, 617 aa, Artificial Sequence
  Description of Artificial Sequence: Synthetic polypeptide
  XENC10125 Chain 2 -  [alphaClaudin18.2]_H1_(G4S)2_ [alphaCD3]_H1.32_L1.47_scFv(GKPGS)4_(G4S)2_IgG1_PVA _/S267K-pI(-)_Isosteric_A_L368D/K370S/M428L/N434S
EVQLVQSGAEVKKPGESLRISCKASGYTFTSYWINWVRQMPGKGLEWMGNIYPSDSYTNYNQKFQGHVTISVDKSISTAYLQWSSLKASDTAMYYCTRSWRGNSFDYWGQGTLVTVSSGGGGSGGGGSEVQLVESGGGLVQPGGSLRLSCAASGFTFSTYAMNWVRQAPGKGLEWVGRIRSKANNYATYYADSVKGRFTISRDDSKNTLYLQMNSLRAEDTAVYYCVRHGNFGDSYVSWFAYWGQGTLVTVSSGKPGSGKPGSGKPGSGKPGSQAVVTQEPSLTVSPGGTVTLTCGSSTGAVTTSNYANWVQQKPGKSPRGLIGGTNKRAPGVPARFSGSLLGGKAALTISGAQPEDEADYYCALWYSNHWVFGGGTKLTVLGGGGSGGGGSKTHTCPPCPAPPVAGPSVFLFPPKPKDTLMISRTPEVTCVVVDVKHEDPEVKFNWYVDGVEVHNAKTKPREEQYNSTYRVVSVLTVLHQDWLNGKEYKCKVSNKALPAPIEKTISKAKGQPREPQVYTLPPSREQMTKNQVKLTCLVKGFYPSDIAVEWESNGQPENNYKTTPPVLDSDGSFFLYSKLTVDKSRWQQGNVFSCSVLHEALHSHYTQKSLSLSPGK

SEQ ID NO: 272 - protein, 220 aa, Artificial Sequence; identical to SEQ ID NO: 239
  Description of Artificial Sequence: Synthetic polypeptide
  XENC10125 Chain 3 -  [alphaClaudin18.2]_L1

SEQ ID NO: 273 - protein, 447 aa, Artificial Sequence; identical to SEQ ID NO: 267
  Description of Artificial Sequence: Synthetic polypeptide
  XENC10126 Chain 1 -  [alphaClaudin18.2]_H1_IgG1_ C220S/S364K/E357Q/M428L/N434S

SEQ ID NO: 274 - protein, 617 aa, Artificial Sequence
  Description of Artificial Sequence: Synthetic polypeptide
  XENC10126 Chain 2 -  [alphaClaudin18.2]_H1_(G4S)2_ [alphaCD3]_H1.89_L1.47_scFv(GKPGS)4_(G4S)2_IgG1_PVA _/S267K-pI(-)_Isosteric_A_L368D/K370S/M428L/N434S
EVQLVQSGAEVKKPGESLRISCKASGYTFTSYWINWVRQMPGKGLEWMGNIYPSDSYTNYNQKFQGHVTISVDKSISTAYLQWSSLKASDTAMYYCTRSWRGNSFDYWGQGTLVTVSSGGGGSGGGGSEVQLVESGGGLVQPGGSLRLSCAASGFTFSTYAMNWVRQAPGKGLEWVGRIRSKYNNYATYYADSVKGRFTISRDDSKNTLYLQMNSLRAEDTAVYYCVRHGNFGDEYVSWFAYWGQGTLVTVSSGKPGSGKPGSGKPGSGKPGSQAVVTQEPSLTVSPGGTVTLTCGSSTGAVTTSNYANWVQQKPGKSPRGLIGGTNKRAPGVPARFSGSLLGGKAALTISGAQPEDEADYYCALWYSNHWVFGGGTKLTVLGGGGSGGGGSKTHTCPPCPAPPVAGPSVFLFPPKPKDTLMISRTPEVTCVVVDVKHEDPEVKFNWYVDGVEVHNAKTKPREEQYNSTYRVVSVLTVLHQDWLNGKEYKCKVSNKALPAPIEKTISKAKGQPREPQVYTLPPSREQMTKNQVKLTCLVKGFYPSDIAVEWESNGQPENNYKTTPPVLDSDGSFFLYSKLTVDKSRWQQGNVFSCSVLHEALHSHYTQKSLSLSPGK

SEQ ID NO: 275 - protein, 220 aa, Artificial Sequence; identical to SEQ ID NO: 239
  Description of Artificial Sequence: Synthetic polypeptide
  XENC10126 Chain 3 -  [alphaClaudin18.2]_L1

SEQ ID NO: 276 - protein, 447 aa, Artificial Sequence; identical to SEQ ID NO: 267
  Description of Artificial Sequence: Synthetic polypeptide
  XENC10127 Chain 1 -  [alphaClaudin18.2]_H1_IgG1_ C220S/S364K/E357Q/M428L/N434S

SEQ ID NO: 277 - protein, 617 aa, Artificial Sequence
  Description of Artificial Sequence: Synthetic polypeptide
  XENC10127 Chain 2 -  [alphaClaudin18.2]_H1_(G4S)2_ [alphaCD3]_H1.90_L1.47_scFv(GKPGS)4_(G4S)2_IgG1_PVA _/S267K-pI(-)_Isosteric_A_L368D/K370S/M428L/N434S
EVQLVQSGAEVKKPGESLRISCKASGYTFTSYWINWVRQMPGKGLEWMGNIYPSDSYTNYNQKFQGHVTISVDKSISTAYLQWSSLKASDTAMYYCTRSWRGNSFDYWGQGTLVTVSSGGGGSGGGGSEVQLVESGGGLVQPGGSLRLSCAASGFTFSTYAMNWVRQAPGKGLEWVGRIRSKYNNYATYYADSVKGRFTISRDDSKNTLYLQMNSLRAEDTAVYYCVRHGNFGDPYVSWFAYWGQGTLVTVSSGKPGSGKPGSGKPGSGKPGSQAVVTQEPSLTVSPGGTVTLTCGSSTGAVTTSNYANWVQQKPGKSPRGLIGGTNKRAPGVPARFSGSLLGGKAALTISGAQPEDEADYYCALWYSNHWVFGGGTKLTVLGGGGSGGGGSKTHTCPPCPAPPVAGPSVFLFPPKPKDTLMISRTPEVTCVVVDVKHEDPEVKFNWYVDGVEVHNAKTKPREEQYNSTYRVVSVLTVLHQDWLNGKEYKCKVSNKALPAPIEKTISKAKGQPREPQVYTLPPSREQMTKNQVKLTCLVKGFYPSDIAVEWESNGQPENNYKTTPPVLDSDGSFFLYSKLTVDKSRWQQGNVFSCSVLHEALHSHYTQKSLSLSPGK

SEQ ID NO: 278 - protein, 220 aa, Artificial Sequence; identical to SEQ ID NO: 239
  Description of Artificial Sequence: Synthetic polypeptide
  XENC10127 Chain 3 -  [alphaClaudin18.2]_L1

SEQ ID NO: 279 - protein, 447 aa, Artificial Sequence; identical to SEQ ID NO: 267
  Description of Artificial Sequence: Synthetic polypeptide
  XENC10128 Chain 1 -  [alphaClaudin18.2]_H1_IgG1_ C220S/S364K/E357Q/M428L/N434S

SEQ ID NO: 280 - protein, 617 aa, Artificial Sequence
  Description of Artificial Sequence: Synthetic polypeptide
  XENC10128 Chain 2 -  [alphaClaudin18.2]_H1_(G4S)2_ [alphaCD3]_H1.33_L1.47_scFv(GKPGS)4_(G4S)2_IgG1_PVA _/S267K-pI(-)_Isosteric_A_L368D/K370S/M428L/N434S
EVQLVQSGAEVKKPGESLRISCKASGYTFTSYWINWVRQMPGKGLEWMGNIYPSDSYTNYNQKFQGHVTISVDKSISTAYLQWSSLKASDTAMYYCTRSWRGNSFDYWGQGTLVTVSSGGGGSGGGGSEVQLVESGGGLVQPGGSLRLSCAASGFTFSTYAMNWVRQAPGKGLEWVGRIRSKYNNYATYYADSVKGRFTISRDDSKNTLYLQMNSLRAEDTAVYYCVRHGNFGDSYVSWFDYWGQGTLVTVSSGKPGSGKPGSGKPGSGKPGSQAVVTQEPSLTVSPGGTVTLTCGSSTGAVTTSNYANWVQQKPGKSPRGLIGGTNKRAPGVPARFSGSLLGGKAALTISGAQPEDEADYYCALWYSNHWVFGGGTKLTVLGGGGSGGGGSKTHTCPPCPAPPVAGPSVFLFPPKPKDTLMISRTPEVTCVVVDVKHEDPEVKFNWYVDGVEVHNAKTKPREEQYNSTYRVVSVLTVLHQDWLNGKEYKCKVSNKALPAPIEKTISKAKGQPREPQVYTLPPSREQMTKNQVKLTCLVKGFYPSDIAVEWESNGQPENNYKTTPPVLDSDGSFFLYSKLTVDKSRWQQGNVFSCSVLHEALHSHYTQKSLSLSPGK

SEQ ID NO: 281 - protein, 220 aa, Artificial Sequence; identical to SEQ ID NO: 239
  Description of Artificial Sequence: Synthetic polypeptide
  XENC10128 Chain 3 -  [alphaClaudin18.2]_L1

SEQ ID NO: 282 - protein, 447 aa, Artificial Sequence; identical to SEQ ID NO: 267
  Description of Artificial Sequence: Synthetic polypeptide
  XENC10129 Chain 1 -  [alphaClaudin18.2]_H1_IgG1_ C220S/S364K/E357Q/M428L/N434S

SEQ ID NO: 283 - protein, 617 aa, Artificial Sequence
  Description of Artificial Sequence: Synthetic polypeptide
  XENC10129 Chain 2 -  [alphaClaudin18.2]_H1_(G4S)2_ [alphaCD3]_H1.31_L1.47_scFv(GKPGS)4_(G4S)2_IgG1_PVA _/S267K-pI(-)_Isosteric_A_L368D/K370S/M428L/N434S
EVQLVQSGAEVKKPGESLRISCKASGYTFTSYWINWVRQMPGKGLEWMGNIYPSDSYTNYNQKFQGHVTISVDKSISTAYLQWSSLKASDTAMYYCTRSWRGNSFDYWGQGTLVTVSSGGGGSGGGGSEVQLVESGGGLVQPGGSLRLSCAASGFTFSTYAMSWVRQAPGKGLEWVGRIRSKYNNYATYYADSVKGRFTISRDDSKNTLYLQMNSLRAEDTAVYYCVRHGNFGDSYVSWFAYWGQGTLVTVSSGKPGSGKPGSGKPGSGKPGSQAVVTQEPSLTVSPGGTVTLTCGSSTGAVTTSNYANWVQQKPGKSPRGLIGGTNKRAPGVPARFSGSLLGGKAALTISGAQPEDEADYYCALWYSNHWVFGGGTKLTVLGGGGSGGGGSKTHTCPPCPAPPVAGPSVFLFPPKPKDTLMISRTPEVTCVVVDVKHEDPEVKFNWYVDGVEVHNAKTKPREEQYNSTYRVVSVLTVLHQDWLNGKEYKCKVSNKALPAPIEKTISKAKGQPREPQVYTLPPSREQMTKNQVKLTCLVKGFYPSDIAVEWESNGQPENNYKTTPPVLDSDGSFFLYSKLTVDKSRWQQGNVFSCSVLHEALHSHYTQKSLSLSPGK

SEQ ID NO: 284 - protein, 220 aa, Artificial Sequence; identical to SEQ ID NO: 239
  Description of Artificial Sequence: Synthetic polypeptide
  XENC10129 Chain 3 -  [alphaClaudin18.2]_L1

SEQ ID NO: 285 - protein, 447 aa, Artificial Sequence; identical to SEQ ID NO: 267
  Description of Artificial Sequence: Synthetic polypeptide
  XENC10130 Chain 1 -  [alphaClaudin18.2]_H1_IgG1_ C220S/S364K/E357Q/M428L/N434S

SEQ ID NO: 286 - protein, 617 aa, Artificial Sequence
  Description of Artificial Sequence: Synthetic polypeptide
  XENC10130 Chain 2 -  [alphaClaudin18.2]_H1_(G4S)2_ [alphaCD3] _L1.47_H1.30_scFv(GKPGS)4_(G4S)2_IgG1_PVA _/S267K-pI(-)_Isosteric_A_L368D/K370S/M428L/N434S
EVQLVQSGAEVKKPGESLRISCKASGYTFTSYWINWVRQMPGKGLEWMGNIYPSDSYTNYNQKFQGHVTISVDKSISTAYLQWSSLKASDTAMYYCTRSWRGNSFDYWGQGTLVTVSSGGGGSGGGGSQAVVTQEPSLTVSPGGTVTLTCGSSTGAVTTSNYANWVQQKPGKSPRGLIGGTNKRAPGVPARFSGSLLGGKAALTISGAQPEDEADYYCALWYSNHWVFGGGTKLTVLGKPGSGKPGSGKPGSGKPGSEVQLVESGGGLVQPGGSLRLSCAASGFTFSTYAMNWVRQAPGKGLEWVGRIRSKYNNYATYYADSVKGRFTISRDDSKNTLYLQMNSLRAEDTAVYYCVRHGNFGDSYVSWFAYWGQGTLVTVSSGGGGSGGGGSKTHTCPPCPAPPVAGPSVFLFPPKPKDTLMISRTPEVTCVVVDVKHEDPEVKFNWYVDGVEVHNAKTKPREEQYNSTYRVVSVLTVLHQDWLNGKEYKCKVSNKALPAPIEKTISKAKGQPREPQVYTLPPSREQMTKNQVKLTCLVKGFYPSDIAVEWESNGQPENNYKTTPPVLDSDGSFFLYSKLTVDKSRWQQGNVFSCSVLHEALHSHYTQKSLSLSPGK

SEQ ID NO: 287 - protein, 220 aa, Artificial Sequence; identical to SEQ ID NO: 239
  Description of Artificial Sequence: Synthetic polypeptide
  XENC10130 Chain 3 -  [alphaClaudin18.2]_L1

SEQ ID NO: 288 - protein, 447 aa, Artificial Sequence; identical to SEQ ID NO: 267
  Description of Artificial Sequence: Synthetic polypeptide
  XENC10131 Chain 1 -  [alphaClaudin18.2]_H1_IgG1_ C220S/S364K/E357Q/M428L/N434S

SEQ ID NO: 289 - protein, 617 aa, Artificial Sequence
  Description of Artificial Sequence: Synthetic polypeptide
  XENC10131 Chain 2 -  [alphaClaudin18.2]_H1_(G4S)2_ [alphaCD3] _L1.47_H1.32_scFv(GKPGS)4_(G4S)2_IgG1_PVA _/S267K-pI(-)_Isosteric_A_L368D/K370S/M428L/N434S
EVQLVQSGAEVKKPGESLRISCKASGYTFTSYWINWVRQMPGKGLEWMGNIYPSDSYTNYNQKFQGHVTISVDKSISTAYLQWSSLKASDTAMYYCTRSWRGNSFDYWGQGTLVTVSSGGGGSGGGGSQAVVTQEPSLTVSPGGTVTLTCGSSTGAVTTSNYANWVQQKPGKSPRGLIGGTNKRAPGVPARFSGSLLGGKAALTISGAQPEDEADYYCALWYSNHWVFGGGTKLTVLGKPGSGKPGSGKPGSGKPGSEVQLVESGGGLVQPGGSLRLSCAASGFTFSTYAMNWVRQAPGKGLEWVGRIRSKANNYATYYADSVKGRFTISRDDSKNTLYLQMNSLRAEDTAVYYCVRHGNFGDSYVSWFAYWGQGTLVTVSSGGGGSGGGGSKTHTCPPCPAPPVAGPSVFLFPPKPKDTLMISRTPEVTCVVVDVKHEDPEVKFNWYVDGVEVHNAKTKPREEQYNSTYRVVSVLTVLHQDWLNGKEYKCKVSNKALPAPIEKTISKAKGQPREPQVYTLPPSREQMTKNQVKLTCLVKGFYPSDIAVEWESNGQPENNYKTTPPVLDSDGSFFLYSKLTVDKSRWQQGNVFSCSVLHEALHSHYTQKSLSLSPGK

SEQ ID NO: 290 - protein, 220 aa, Artificial Sequence; identical to SEQ ID NO: 239
  Description of Artificial Sequence: Synthetic polypeptide
  XENC10131 Chain 3 -  [alphaClaudin18.2]_L1

SEQ ID NO: 291 - protein, 447 aa, Artificial Sequence; identical to SEQ ID NO: 267
  Description of Artificial Sequence: Synthetic polypeptide
  XENC10132 Chain 1 -  [alphaClaudin18.2]_H1_IgG1_ C220S/S364K/E357Q/M428L/N434S

SEQ ID NO: 292 - protein, 617 aa, Artificial Sequence
  Description of Artificial Sequence: Synthetic polypeptide
  XENC10132 Chain 2 -  [alphaClaudin18.2]_H1_(G4S)2_ [alphaCD3] _L1.47_H1.89_scFv(GKPGS)4_(G4S)2_IgG1_PVA _/S267K-pI(-)_Isosteric_A_L368D/K370S/M428L/N434S
EVQLVQSGAEVKKPGESLRISCKASGYTFTSYWINWVRQMPGKGLEWMGNIYPSDSYTNYNQKFQGHVTISVDKSISTAYLQWSSLKASDTAMYYCTRSWRGNSFDYWGQGTLVTVSSGGGGSGGGGSQAVVTQEPSLTVSPGGTVTLTCGSSTGAVTTSNYANWVQQKPGKSPRGLIGGTNKRAPGVPARFSGSLLGGKAALTISGAQPEDEADYYCALWYSNHWVFGGGTKLTVLGKPGSGKPGSGKPGSGKPGSEVQLVESGGGLVQPGGSLRLSCAASGFTFSTYAMNWVRQAPGKGLEWVGRIRSKYNNYATYYADSVKGRFTISRDDSKNTLYLQMNSLRAEDTAVYYCVRHGNFGDEYVSWFAYWGQGTLVTVSSGGGGSGGGGSKTHTCPPCPAPPVAGPSVFLFPPKPKDTLMISRTPEVTCVVVDVKHEDPEVKFNWYVDGVEVHNAKTKPREEQYNSTYRVVSVLTVLHQDWLNGKEYKCKVSNKALPAPIEKTISKAKGQPREPQVYTLPPSREQMTKNQVKLTCLVKGFYPSDIAVEWESNGQPENNYKTTPPVLDSDGSFFLYSKLTVDKSRWQQGNVFSCSVLHEALHSHYTQKSLSLSPGK

SEQ ID NO: 293 - protein, 220 aa, Artificial Sequence; identical to SEQ ID NO: 239
  Description of Artificial Sequence: Synthetic polypeptide
  XENC10132 Chain 3 -  [alphaClaudin18.2]_L1

SEQ ID NO: 294 - protein, 447 aa, Artificial Sequence; identical to SEQ ID NO: 267
  Description of Artificial Sequence: Synthetic polypeptide
  XENC10133 Chain 1 -  [alphaClaudin18.2]_H1_IgG1_ C220S/S364K/E357Q/M428L/N434S

SEQ ID NO: 295 - protein, 617 aa, Artificial Sequence
  Description of Artificial Sequence: Synthetic polypeptide
  XENC10133 Chain 2 -  [alphaClaudin18.2]_H1_(G4S)2_ [alphaCD3] _L1.47_H1.90_scFv(GKPGS)4_(G4S)2_IgG1_PVA _/S267K-pI(-)_Isosteric_A_L368D/K370S/M428L/N434S
EVQLVQSGAEVKKPGESLRISCKASGYTFTSYWINWVRQMPGKGLEWMGNIYPSDSYTNYNQKFQGHVTISVDKSISTAYLQWSSLKASDTAMYYCTRSWRGNSFDYWGQGTLVTVSSGGGGSGGGGSQAVVTQEPSLTVSPGGTVTLTCGSSTGAVTTSNYANWVQQKPGKSPRGLIGGTNKRAPGVPARFSGSLLGGKAALTISGAQPEDEADYYCALWYSNHWVFGGGTKLTVLGKPGSGKPGSGKPGSGKPGSEVQLVESGGGLVQPGGSLRLSCAASGFTFSTYAMNWVRQAPGKGLEWVGRIRSKYNNYATYYADSVKGRFTISRDDSKNTLYLQMNSLRAEDTAVYYCVRHGNFGDPYVSWFAYWGQGTLVTVSSGGGGSGGGGSKTHTCPPCPAPPVAGPSVFLFPPKPKDTLMISRTPEVTCVVVDVKHEDPEVKFNWYVDGVEVHNAKTKPREEQYNSTYRVVSVLTVLHQDWLNGKEYKCKVSNKALPAPIEKTISKAKGQPREPQVYTLPPSREQMTKNQVKLTCLVKGFYPSDIAVEWESNGQPENNYKTTPPVLDSDGSFFLYSKLTVDKSRWQQGNVFSCSVLHEALHSHYTQKSLSLSPGK

SEQ ID NO: 296 - protein, 220 aa, Artificial Sequence; identical to SEQ ID NO: 239
  Description of Artificial Sequence: Synthetic polypeptide
  XENC10133 Chain 3 -  [alphaClaudin18.2]_L1

SEQ ID NO: 297 - protein, 447 aa, Artificial Sequence; identical to SEQ ID NO: 267
  Description of Artificial Sequence: Synthetic polypeptide
  XENC10134 Chain 1 -  [alphaClaudin18.2]_H1_IgG1_ C220S/S364K/E357Q/M428L/N434S

SEQ ID NO: 298 - protein, 617 aa, Artificial Sequence
  Description of Artificial Sequence: Synthetic polypeptide
  XENC10134 Chain 2 -  [alphaClaudin18.2]_H1_(G4S)2_ [alphaCD3] _L1.47_H1.33_scFv(GKPGS)4_(G4S)2_IgG1_PVA _/S267K-pI(-)_Isosteric_A_L368D/K370S/M428L/N434S
EVQLVQSGAEVKKPGESLRISCKASGYTFTSYWINWVRQMPGKGLEWMGNIYPSDSYTNYNQKFQGHVTISVDKSISTAYLQWSSLKASDTAMYYCTRSWRGNSFDYWGQGTLVTVSSGGGGSGGGGSQAVVTQEPSLTVSPGGTVTLTCGSSTGAVTTSNYANWVQQKPGKSPRGLIGGTNKRAPGVPARFSGSLLGGKAALTISGAQPEDEADYYCALWYSNHWVFGGGTKLTVLGKPGSGKPGSGKPGSGKPGSEVQLVESGGGLVQPGGSLRLSCAASGFTFSTYAMNWVRQAPGKGLEWVGRIRSKYNNYATYYADSVKGRFTISRDDSKNTLYLQMNSLRAEDTAVYYCVRHGNFGDSYVSWFDYWGQGTLVTVSSGGGGSGGGGSKTHTCPPCPAPPVAGPSVFLFPPKPKDTLMISRTPEVTCVVVDVKHEDPEVKFNWYVDGVEVHNAKTKPREEQYNSTYRVVSVLTVLHQDWLNGKEYKCKVSNKALPAPIEKTISKAKGQPREPQVYTLPPSREQMTKNQVKLTCLVKGFYPSDIAVEWESNGQPENNYKTTPPVLDSDGSFFLYSKLTVDKSRWQQGNVFSCSVLHEALHSHYTQKSLSLSPGK

SEQ ID NO: 299 - protein, 220 aa, Artificial Sequence; identical to SEQ ID NO: 239
  Description of Artificial Sequence: Synthetic polypeptide
  XENC10134 Chain 3 -  [alphaClaudin18.2]_L1

SEQ ID NO: 300 - protein, 447 aa, Artificial Sequence; identical to SEQ ID NO: 267
  Description of Artificial Sequence: Synthetic polypeptide
  XENC10135 Chain 1 -  [alphaClaudin18.2]_H1_IgG1_ C220S/S364K/E357Q/M428L/N434S

SEQ ID NO: 301 - protein, 617 aa, Artificial Sequence
  Description of Artificial Sequence: Synthetic polypeptide
  XENC10135 Chain 2 -  [alphaClaudin18.2]_H1_(G4S)2_ [alphaCD3] _L1.47_H1.31_scFv(GKPGS)4_(G4S)2_IgG1_PVA _/S267K-pI(-)_Isosteric_A_L368D/K370S/M428L/N434S
EVQLVQSGAEVKKPGESLRISCKASGYTFTSYWINWVRQMPGKGLEWMGNIYPSDSYTNYNQKFQGHVTISVDKSISTAYLQWSSLKASDTAMYYCTRSWRGNSFDYWGQGTLVTVSSGGGGSGGGGSQAVVTQEPSLTVSPGGTVTLTCGSSTGAVTTSNYANWVQQKPGKSPRGLIGGTNKRAPGVPARFSGSLLGGKAALTISGAQPEDEADYYCALWYSNHWVFGGGTKLTVLGKPGSGKPGSGKPGSGKPGSEVQLVESGGGLVQPGGSLRLSCAASGFTFSTYAMSWVRQAPGKGLEWVGRIRSKYNNYATYYADSVKGRFTISRDDSKNTLYLQMNSLRAEDTAVYYCVRHGNFGDSYVSWFAYWGQGTLVTVSSGGGGSGGGGSKTHTCPPCPAPPVAGPSVFLFPPKPKDTLMISRTPEVTCVVVDVKHEDPEVKFNWYVDGVEVHNAKTKPREEQYNSTYRVVSVLTVLHQDWLNGKEYKCKVSNKALPAPIEKTISKAKGQPREPQVYTLPPSREQMTKNQVKLTCLVKGFYPSDIAVEWESNGQPENNYKTTPPVLDSDGSFFLYSKLTVDKSRWQQGNVFSCSVLHEALHSHYTQKSLSLSPGK

SEQ ID NO: 302 - protein, 220 aa, Artificial Sequence; identical to SEQ ID NO: 239
  Description of Artificial Sequence: Synthetic polypeptide
  XENC10135 Chain 3 -  [alphaClaudin18.2]_L1

SEQ ID NO: 303 - protein, 447 aa, Artificial Sequence
  Description of Artificial Sequence: Synthetic polypeptide
  XENC10136 Chain 1 -  [alphaClaudin18.2]_H2_IgG1_ C220S/S364K/E357Q
QVQLVQSGAEVKKPGASVKVSCKASGYTFTSYWINWVRQAPGQGLEWMGNIYPSDSYTNYNQKFQGRVTMTVDKSTSTAYMELSSLRSEDTAVYYCTRSWRGNSFDYWGQGTLVTVSSASTKGPSVFPLAPSSKSTSGGTAALGCLVKDYFPEPVTVSWNSGALTSGVHTFPAVLQSSGLYSLSSVVTVPSSSLGTQTYICNVNHKPSDTKVDKKVEPKSCDKTHTCPPCPAPPVAGPSVFLFPPKPKDTLMISRTPEVTCVVVDVKHEDPEVKFNWYVDGVEVHNAKTKPREEEYNSTYRVVSVLTVLHQDWLNGKEYKCKVSNKALPAPIEKTISKAKGQPREPQVYTLPPSREEMTKNQVSLTCDVSGFYPSDIAVEWESDGQPENNYKTTPPVLDSDGSFFLYSKLTVDKSRWEQGDVFSCSVMHEALHNHYTQKSLSLSPGK

SEQ ID NO: 304 - protein, 617 aa, Artificial Sequence
  Description of Artificial Sequence: Synthetic polypeptide
  XENC10136 Chain 2 -  [alphaClaudin18.2]_H2_(G4S)2_ [alphaCD3]_H1.89_L1.47_scFv(GKPGS)4_(G4S)2_IgG1_PVA _/S267K-pI(-)_Isosteric_A_L368D/K370S
QVQLVQSGAEVKKPGASVKVSCKASGYTFTSYWINWVRQAPGQGLEWMGNIYPSDSYTNYNQKFQGRVTMTVDKSTSTAYMELSSLRSEDTAVYYCTRSWRGNSFDYWGQGTLVTVSSGGGGSGGGGSEVQLVESGGGLVQPGGSLRLSCAASGFTFSTYAMNWVRQAPGKGLEWVGRIRSKYNNYATYYADSVKGRFTISRDDSKNTLYLQMNSLRAEDTAVYYCVRHGNFGDEYVSWFAYWGQGTLVTVSSGKPGSGKPGSGKPGSGKPGSQAVVTQEPSLTVSPGGTVTLTCGSSTGAVTTSNYANWVQQKPGKSPRGLIGGTNKRAPGVPARFSGSLLGGKAALTISGAQPEDEADYYCALWYSNHWVFGGGTKLTVLGGGGSGGGGSKTHTCPPCPAPPVAGPSVFLFPPKPKDTLMISRTPEVTCVVVDVKHEDPEVKFNWYVDGVEVHNAKTKPREEQYNSTYRVVSVLTVLHQDWLNGKEYKCKVSNKALPAPIEKTISKAKGQPREPQVYTLPPSREQMTKNQVKLTCLVKGFYPSDIAVEWESNGQPENNYKTTPPVLDSDGSFFLYSKLTVDKSRWQQGNVFSCSVMHEALHNHYTQKSLSLSPGK

SEQ ID NO: 305 - protein, 220 aa, Artificial Sequence; identical to SEQ ID NO: 239
  Description of Artificial Sequence: Synthetic polypeptide
  XENC10136 Chain 3 -  [alphaClaudin18.2]_L1

SEQ ID NO: 306 - protein, 447 aa, Artificial Sequence; identical to SEQ ID NO: 303
  Description of Artificial Sequence: Synthetic polypeptide
  XENC10137 Chain 1 -  [alphaClaudin18.2]_H2_IgG1_ C220S/S364K/E357Q

SEQ ID NO: 307 - protein, 617 aa, Artificial Sequence
  Description of Artificial Sequence: Synthetic polypeptide
  XENC10137 Chain 2 -  [alphaClaudin18.2]_H2_(G4S)2_ [alphaCD3]_H1.90_L1.47_scFv(GKPGS)4_(G4S)2_IgG1_PVA _/S267K-pI(-)_Isosteric_A_L368D/K370S
QVQLVQSGAEVKKPGASVKVSCKASGYTFTSYWINWVRQAPGQGLEWMGNIYPSDSYTNYNQKFQGRVTMTVDKSTSTAYMELSSLRSEDTAVYYCTRSWRGNSFDYWGQGTLVTVSSGGGGSGGGGSEVQLVESGGGLVQPGGSLRLSCAASGFTFSTYAMNWVRQAPGKGLEWVGRIRSKYNNYATYYADSVKGRFTISRDDSKNTLYLQMNSLRAEDTAVYYCVRHGNFGDPYVSWFAYWGQGTLVTVSSGKPGSGKPGSGKPGSGKPGSQAVVTQEPSLTVSPGGTVTLTCGSSTGAVTTSNYANWVQQKPGKSPRGLIGGTNKRAPGVPARFSGSLLGGKAALTISGAQPEDEADYYCALWYSNHWVFGGGTKLTVLGGGGSGGGGSKTHTCPPCPAPPVAGPSVFLFPPKPKDTLMISRTPEVTCVVVDVKHEDPEVKFNWYVDGVEVHNAKTKPREEQYNSTYRVVSVLTVLHQDWLNGKEYKCKVSNKALPAPIEKTISKAKGQPREPQVYTLPPSREQMTKNQVKLTCLVKGFYPSDIAVEWESNGQPENNYKTTPPVLDSDGSFFLYSKLTVDKSRWQQGNVFSCSVMHEALHNHYTQKSLSLSPGK

SEQ ID NO: 308 - protein, 220 aa, Artificial Sequence; identical to SEQ ID NO: 239
  Description of Artificial Sequence: Synthetic polypeptide
  XENC10137 Chain 3 -  [alphaClaudin18.2]_L1

SEQ ID NO: 309 - protein, 447 aa, Artificial Sequence; identical to SEQ ID NO: 303
  Description of Artificial Sequence: Synthetic polypeptide
  XENC10138 Chain 1 -  [alphaClaudin18.2]_H2_IgG1_ C220S/S364K/E357Q

SEQ ID NO: 310 - protein, 617 aa, Artificial Sequence
  Description of Artificial Sequence: Synthetic polypeptide
  XENC10138 Chain 2 -  [alphaClaudin18.2]_H2_(G4S)2_ [alphaCD3]_H1.33_L1.47_scFv(GKPGS)4_(G4S)2_IgG1_PVA _/S267K-pI(-)_Isosteric_A_L368D/K370S
QVQLVQSGAEVKKPGASVKVSCKASGYTFTSYWINWVRQAPGQGLEWMGNIYPSDSYTNYNQKFQGRVTMTVDKSTSTAYMELSSLRSEDTAVYYCTRSWRGNSFDYWGQGTLVTVSSGGGGSGGGGSEVQLVESGGGLVQPGGSLRLSCAASGFTFSTYAMNWVRQAPGKGLEWVGRIRSKYNNYATYYADSVKGRFTISRDDSKNTLYLQMNSLRAEDTAVYYCVRHGNFGDSYVSWFDYWGQGTLVTVSSGKPGSGKPGSGKPGSGKPGSQAVVTQEPSLTVSPGGTVTLTCGSSTGAVTTSNYANWVQQKPGKSPRGLIGGTNKRAPGVPARFSGSLLGGKAALTISGAQPEDEADYYCALWYSNHWVFGGGTKLTVLGGGGSGGGGSKTHTCPPCPAPPVAGPSVFLFPPKPKDTLMISRTPEVTCVVVDVKHEDPEVKFNWYVDGVEVHNAKTKPREEQYNSTYRVVSVLTVLHQDWLNGKEYKCKVSNKALPAPIEKTISKAKGQPREPQVYTLPPSREQMTKNQVKLTCLVKGFYPSDIAVEWESNGQPENNYKTTPPVLDSDGSFFLYSKLTVDKSRWQQGNVFSCSVMHEALHNHYTQKSLSLSPGK

SEQ ID NO: 311 - protein, 220 aa, Artificial Sequence; identical to SEQ ID NO: 239
  Description of Artificial Sequence: Synthetic polypeptide
  XENC10138 Chain 3 -  [alphaClaudin18.2]_L1

SEQ ID NO: 312 - protein, 447 aa, Artificial Sequence; identical to SEQ ID NO: 303
  Description of Artificial Sequence: Synthetic polypeptide
  XENC10139 Chain 1 -  [alphaClaudin18.2]_H2_IgG1_ C220S/S364K/E357Q

SEQ ID NO: 313 - protein, 617 aa, Artificial Sequence
  Description of Artificial Sequence: Synthetic polypeptide
  XENC10139 Chain 2 -  [alphaClaudin18.2]_H2_(G4S)2_ [alphaCD3]_H1.31_L1.47_scFv(GKPGS)4_(G4S)2_IgG1_PVA _/S267K-pI(-)_Isosteric_A_L368D/K370S
QVQLVQSGAEVKKPGASVKVSCKASGYTFTSYWINWVRQAPGQGLEWMGNIYPSDSYTNYNQKFQGRVTMTVDKSTSTAYMELSSLRSEDTAVYYCTRSWRGNSFDYWGQGTLVTVSSGGGGSGGGGSEVQLVESGGGLVQPGGSLRLSCAASGFTFSTYAMSWVRQAPGKGLEWVGRIRSKYNNYATYYADSVKGRFTISRDDSKNTLYLQMNSLRAEDTAVYYCVRHGNFGDSYVSWFAYWGQGTLVTVSSGKPGSGKPGSGKPGSGKPGSQAVVTQEPSLTVSPGGTVTLTCGSSTGAVTTSNYANWVQQKPGKSPRGLIGGTNKRAPGVPARFSGSLLGGKAALTISGAQPEDEADYYCALWYSNHWVFGGGTKLTVLGGGGSGGGGSKTHTCPPCPAPPVAGPSVFLFPPKPKDTLMISRTPEVTCVVVDVKHEDPEVKFNWYVDGVEVHNAKTKPREEQYNSTYRVVSVLTVLHQDWLNGKEYKCKVSNKALPAPIEKTISKAKGQPREPQVYTLPPSREQMTKNQVKLTCLVKGFYPSDIAVEWESNGQPENNYKTTPPVLDSDGSFFLYSKLTVDKSRWQQGNVFSCSVMHEALHNHYTQKSLSLSPGK

SEQ ID NO: 314 - protein, 220 aa, Artificial Sequence; identical to SEQ ID NO: 239
  Description of Artificial Sequence: Synthetic polypeptide
  XENC10139 Chain 3 -  [alphaClaudin18.2]_L1

SEQ ID NO: 315 - protein, 447 aa, Artificial Sequence; identical to SEQ ID NO: 303
  Description of Artificial Sequence: Synthetic polypeptide
  XENC10140 Chain 1 -  [alphaClaudin18.2]_H2_IgG1_ C220S/S364K/E357Q

SEQ ID NO: 316 - protein, 617 aa, Artificial Sequence
  Description of Artificial Sequence: Synthetic polypeptide
  XENC10140 Chain 2 -  [alphaClaudin18.2]_H2_(G4S)2_ [alphaCD3] _L1.47_H1.30_scFv(GKPGS)4_(G4S)2_IgG1_PVA _/S267K-pI(-)_Isosteric_A_L368D/K370S
QVQLVQSGAEVKKPGASVKVSCKASGYTFTSYWINWVRQAPGQGLEWMGNIYPSDSYTNYNQKFQGRVTMTVDKSTSTAYMELSSLRSEDTAVYYCTRSWRGNSFDYWGQGTLVTVSSGGGGSGGGGSQAVVTQEPSLTVSPGGTVTLTCGSSTGAVTTSNYANWVQQKPGKSPRGLIGGTNKRAPGVPARFSGSLLGGKAALTISGAQPEDEADYYCALWYSNHWVFGGGTKLTVLGKPGSGKPGSGKPGSGKPGSEVQLVESGGGLVQPGGSLRLSCAASGFTFSTYAMNWVRQAPGKGLEWVGRIRSKYNNYATYYADSVKGRFTISRDDSKNTLYLQMNSLRAEDTAVYYCVRHGNFGDSYVSWFAYWGQGTLVTVSSGGGGSGGGGSKTHTCPPCPAPPVAGPSVFLFPPKPKDTLMISRTPEVTCVVVDVKHEDPEVKFNWYVDGVEVHNAKTKPREEQYNSTYRVVSVLTVLHQDWLNGKEYKCKVSNKALPAPIEKTISKAKGQPREPQVYTLPPSREQMTKNQVKLTCLVKGFYPSDIAVEWESNGQPENNYKTTPPVLDSDGSFFLYSKLTVDKSRWQQGNVFSCSVMHEALHNHYTQKSLSLSPGK

SEQ ID NO: 317 - protein, 220 aa, Artificial Sequence; identical to SEQ ID NO: 239
  Description of Artificial Sequence: Synthetic polypeptide
  XENC10140 Chain 3 -  [alphaClaudin18.2]_L1

SEQ ID NO: 318 - protein, 447 aa, Artificial Sequence; identical to SEQ ID NO: 303
  Description of Artificial Sequence: Synthetic polypeptide
  XENC10141 Chain 1 -  [alphaClaudin18.2]_H2_IgG1_ C220S/S364K/E357Q

SEQ ID NO: 319 - protein, 617 aa, Artificial Sequence
  Description of Artificial Sequence: Synthetic polypeptide
  XENC10141 Chain 2 -  [alphaClaudin18.2]_H2_(G4S)2_ [alphaCD3] _L1.47_H1.32_scFv(GKPGS)4_(G4S)2_IgG1_PVA _/S267K-pI(-)_Isosteric_A_L368D/K370S
QVQLVQSGAEVKKPGASVKVSCKASGYTFTSYWINWVRQAPGQGLEWMGNIYPSDSYTNYNQKFQGRVTMTVDKSTSTAYMELSSLRSEDTAVYYCTRSWRGNSFDYWGQGTLVTVSSGGGGSGGGGSQAVVTQEPSLTVSPGGTVTLTCGSSTGAVTTSNYANWVQQKPGKSPRGLIGGTNKRAPGVPARFSGSLLGGKAALTISGAQPEDEADYYCALWYSNHWVFGGGTKLTVLGKPGSGKPGSGKPGSGKPGSEVQLVESGGGLVQPGGSLRLSCAASGFTFSTYAMNWVRQAPGKGLEWVGRIRSKANNYATYYADSVKGRFTISRDDSKNTLYLQMNSLRAEDTAVYYCVRHGNFGDSYVSWFAYWGQGTLVTVSSGGGGSGGGGSKTHTCPPCPAPPVAGPSVFLFPPKPKDTLMISRTPEVTCVVVDVKHEDPEVKFNWYVDGVEVHNAKTKPREEQYNSTYRVVSVLTVLHQDWLNGKEYKCKVSNKALPAPIEKTISKAKGQPREPQVYTLPPSREQMTKNQVKLTCLVKGFYPSDIAVEWESNGQPENNYKTTPPVLDSDGSFFLYSKLTVDKSRWQQGNVFSCSVMHEALHNHYTQKSLSLSPGK

SEQ ID NO: 320 - protein, 220 aa, Artificial Sequence; identical to SEQ ID NO: 239
  Description of Artificial Sequence: Synthetic polypeptide
  XENC10141 Chain 3 -  [alphaClaudin18.2]_L1

SEQ ID NO: 321 - protein, 447 aa, Artificial Sequence; identical to SEQ ID NO: 303
  Description of Artificial Sequence: Synthetic polypeptide
  XENC10141 Chain 1 -  [alphaClaudin18.2]_H2_IgG1_ C220S/S364K/E357Q

SEQ ID NO: 322 - protein, 617 aa, Artificial Sequence
  Description of Artificial Sequence: Synthetic polypeptide
  XENC10141 Chain 2 -  [alphaClaudin18.2]_H2_(G4S)2_ [alphaCD3] _L1.47_H1.89_scFv(GKPGS)4_(G4S)2_IgG1_PVA _/S267K-pI(-)_Isosteric_A_L368D/K370S
QVQLVQSGAEVKKPGASVKVSCKASGYTFTSYWINWVRQAPGQGLEWMGNIYPSDSYTNYNQKFQGRVTMTVDKSTSTAYMELSSLRSEDTAVYYCTRSWRGNSFDYWGQGTLVTVSSGGGGSGGGGSQAVVTQEPSLTVSPGGTVTLTCGSSTGAVTTSNYANWVQQKPGKSPRGLIGGTNKRAPGVPARFSGSLLGGKAALTISGAQPEDEADYYCALWYSNHWVFGGGTKLTVLGKPGSGKPGSGKPGSGKPGSEVQLVESGGGLVQPGGSLRLSCAASGFTFSTYAMNWVRQAPGKGLEWVGRIRSKYNNYATYYADSVKGRFTISRDDSKNTLYLQMNSLRAEDTAVYYCVRHGNFGDEYVSWFAYWGQGTLVTVSSGGGGSGGGGSKTHTCPPCPAPPVAGPSVFLFPPKPKDTLMISRTPEVTCVVVDVKHEDPEVKFNWYVDGVEVHNAKTKPREEQYNSTYRVVSVLTVLHQDWLNGKEYKCKVSNKALPAPIEKTISKAKGQPREPQVYTLPPSREQMTKNQVKLTCLVKGFYPSDIAVEWESNGQPENNYKTTPPVLDSDGSFFLYSKLTVDKSRWQQGNVFSCSVMHEALHNHYTQKSLSLSPGK

SEQ ID NO: 323 - protein, 220 aa, Artificial Sequence; identical to SEQ ID NO: 239
  Description of Artificial Sequence: Synthetic polypeptide
  XENC10141 Chain 3 -  [alphaClaudin18.2]_L1

SEQ ID NO: 324 - protein, 447 aa, Artificial Sequence; identical to SEQ ID NO: 303
  Description of Artificial Sequence: Synthetic polypeptide
  XENC10142 Chain 1 -  [alphaClaudin18.2]_H2_IgG1_ C220S/S364K/E357Q

SEQ ID NO: 325 - protein, 617 aa, Artificial Sequence
  Description of Artificial Sequence: Synthetic polypeptide
  XENC10142 Chain 2 -  [alphaClaudin18.2]_H2_(G4S)2_ [alphaCD3] _L1.47_H1.90_scFv(GKPGS)4_(G4S)2_IgG1_PVA _/S267K-pI(-)_Isosteric_A_L368D/K370S
QVQLVQSGAEVKKPGASVKVSCKASGYTFTSYWINWVRQAPGQGLEWMGNIYPSDSYTNYNQKFQGRVTMTVDKSTSTAYMELSSLRSEDTAVYYCTRSWRGNSFDYWGQGTLVTVSSGGGGSGGGGSQAVVTQEPSLTVSPGGTVTLTCGSSTGAVTTSNYANWVQQKPGKSPRGLIGGTNKRAPGVPARFSGSLLGGKAALTISGAQPEDEADYYCALWYSNHWVFGGGTKLTVLGKPGSGKPGSGKPGSGKPGSEVQLVESGGGLVQPGGSLRLSCAASGFTFSTYAMNWVRQAPGKGLEWVGRIRSKYNNYATYYADSVKGRFTISRDDSKNTLYLQMNSLRAEDTAVYYCVRHGNFGDPYVSWFAYWGQGTLVTVSSGGGGSGGGGSKTHTCPPCPAPPVAGPSVFLFPPKPKDTLMISRTPEVTCVVVDVKHEDPEVKFNWYVDGVEVHNAKTKPREEQYNSTYRVVSVLTVLHQDWLNGKEYKCKVSNKALPAPIEKTISKAKGQPREPQVYTLPPSREQMTKNQVKLTCLVKGFYPSDIAVEWESNGQPENNYKTTPPVLDSDGSFFLYSKLTVDKSRWQQGNVFSCSVMHEALHNHYTQKSLSLSPGK

SEQ ID NO: 326 - protein, 220 aa, Artificial Sequence; identical to SEQ ID NO: 239
  Description of Artificial Sequence: Synthetic polypeptide
  XENC10142 Chain 3 -  [alphaClaudin18.2]_L1

SEQ ID NO: 327 - protein, 447 aa, Artificial Sequence; identical to SEQ ID NO: 303
  Description of Artificial Sequence: Synthetic polypeptide
  XENC10143 Chain 1 -  [alphaClaudin18.2]_H2_IgG1_ C220S/S364K/E357Q

SEQ ID NO: 328 - protein, 617 aa, Artificial Sequence
  Description of Artificial Sequence: Synthetic polypeptide
  XENC10143 Chain 2 -  [alphaClaudin18.2]_H2_(G4S)2_ [alphaCD3] _L1.47_H1.33_scFv(GKPGS)4_(G4S)2_IgG1_PVA _/S267K-pI(-)_Isosteric_A_L368D/K370S
QVQLVQSGAEVKKPGASVKVSCKASGYTFTSYWINWVRQAPGQGLEWMGNIYPSDSYTNYNQKFQGRVTMTVDKSTSTAYMELSSLRSEDTAVYYCTRSWRGNSFDYWGQGTLVTVSSGGGGSGGGGSQAVVTQEPSLTVSPGGTVTLTCGSSTGAVTTSNYANWVQQKPGKSPRGLIGGTNKRAPGVPARFSGSLLGGKAALTISGAQPEDEADYYCALWYSNHWVFGGGTKLTVLGKPGSGKPGSGKPGSGKPGSEVQLVESGGGLVQPGGSLRLSCAASGFTFSTYAMNWVRQAPGKGLEWVGRIRSKYNNYATYYADSVKGRFTISRDDSKNTLYLQMNSLRAEDTAVYYCVRHGNFGDSYVSWFDYWGQGTLVTVSSGGGGSGGGGSKTHTCPPCPAPPVAGPSVFLFPPKPKDTLMISRTPEVTCVVVDVKHEDPEVKFNWYVDGVEVHNAKTKPREEQYNSTYRVVSVLTVLHQDWLNGKEYKCKVSNKALPAPIEKTISKAKGQPREPQVYTLPPSREQMTKNQVKLTCLVKGFYPSDIAVEWESNGQPENNYKTTPPVLDSDGSFFLYSKLTVDKSRWQQGNVFSCSVMHEALHNHYTQKSLSLSPGK

SEQ ID NO: 329 - protein, 220 aa, Artificial Sequence; identical to SEQ ID NO: 239
  Description of Artificial Sequence: Synthetic polypeptide
  XENC10143 Chain 3 -  [alphaClaudin18.2]_L1

SEQ ID NO: 330 - protein, 447 aa, Artificial Sequence; identical to SEQ ID NO: 303
  Description of Artificial Sequence: Synthetic polypeptide
  XENC10144 Chain 1 -  [alphaClaudin18.2]_H2_IgG1_ C220S/S364K/E357Q

SEQ ID NO: 331 - protein, 617 aa, Artificial Sequence
  Description of Artificial Sequence: Synthetic polypeptide
  XENC10144 Chain 2 -  [alphaClaudin18.2]_H2_(G4S)2_ [alphaCD3] _L1.47_H1.31_scFv(GKPGS)4_(G4S)2_IgG1_PVA _/S267K-pI(-)_Isosteric_A_L368D/K370S
QVQLVQSGAEVKKPGASVKVSCKASGYTFTSYWINWVRQAPGQGLEWMGNIYPSDSYTNYNQKFQGRVTMTVDKSTSTAYMELSSLRSEDTAVYYCTRSWRGNSFDYWGQGTLVTVSSGGGGSGGGGSQAVVTQEPSLTVSPGGTVTLTCGSSTGAVTTSNYANWVQQKPGKSPRGLIGGTNKRAPGVPARFSGSLLGGKAALTISGAQPEDEADYYCALWYSNHWVFGGGTKLTVLGKPGSGKPGSGKPGSGKPGSEVQLVESGGGLVQPGGSLRLSCAASGFTFSTYAMSWVRQAPGKGLEWVGRIRSKYNNYATYYADSVKGRFTISRDDSKNTLYLQMNSLRAEDTAVYYCVRHGNFGDSYVSWFAYWGQGTLVTVSSGGGGSGGGGSKTHTCPPCPAPPVAGPSVFLFPPKPKDTLMISRTPEVTCVVVDVKHEDPEVKFNWYVDGVEVHNAKTKPREEQYNSTYRVVSVLTVLHQDWLNGKEYKCKVSNKALPAPIEKTISKAKGQPREPQVYTLPPSREQMTKNQVKLTCLVKGFYPSDIAVEWESNGQPENNYKTTPPVLDSDGSFFLYSKLTVDKSRWQQGNVFSCSVMHEALHNHYTQKSLSLSPGK

SEQ ID NO: 332 - protein, 220 aa, Artificial Sequence; identical to SEQ ID NO: 239
  Description of Artificial Sequence: Synthetic polypeptide
  XENC10144 Chain 3 -  [alphaClaudin18.2]_L1

SEQ ID NO: 333 - protein, 447 aa, Artificial Sequence
  Description of Artificial Sequence: Synthetic polypeptide
  XENC10145 Chain 1 -  [alphaClaudin18.2]_H2_IgG1_ C220S/S364K/E357Q/M428L/N434S
QVQLVQSGAEVKKPGASVKVSCKASGYTFTSYWINWVRQAPGQGLEWMGNIYPSDSYTNYNQKFQGRVTMTVDKSTSTAYMELSSLRSEDTAVYYCTRSWRGNSFDYWGQGTLVTVSSASTKGPSVFPLAPSSKSTSGGTAALGCLVKDYFPEPVTVSWNSGALTSGVHTFPAVLQSSGLYSLSSVVTVPSSSLGTQTYICNVNHKPSDTKVDKKVEPKSCDKTHTCPPCPAPPVAGPSVFLFPPKPKDTLMISRTPEVTCVVVDVKHEDPEVKFNWYVDGVEVHNAKTKPREEEYNSTYRVVSVLTVLHQDWLNGKEYKCKVSNKALPAPIEKTISKAKGQPREPQVYTLPPSREEMTKNQVSLTCDVSGFYPSDIAVEWESDGQPENNYKTTPPVLDSDGSFFLYSKLTVDKSRWEQGDVFSCSVLHEALHSHYTQKSLSLSPGK

SEQ ID NO: 334 - protein, 617 aa, Artificial Sequence
  Description of Artificial Sequence: Synthetic polypeptide
  XENC10145 Chain 2 -  [alphaClaudin18.2]_H2_(G4S)2_ [alphaCD3]_H1.30_L1.47_scFv(GKPGS)4_(G4S)2_IgG1_PVA _/S267K-pI(-)_Isosteric_A_L368D/K370S/M428L/N434S
QVQLVQSGAEVKKPGASVKVSCKASGYTFTSYWINWVRQAPGQGLEWMGNIYPSDSYTNYNQKFQGRVTMTVDKSTSTAYMELSSLRSEDTAVYYCTRSWRGNSFDYWGQGTLVTVSSGGGGSGGGGSEVQLVESGGGLVQPGGSLRLSCAASGFTFSTYAMNWVRQAPGKGLEWVGRIRSKYNNYATYYADSVKGRFTISRDDSKNTLYLQMNSLRAEDTAVYYCVRHGNFGDSYVSWFAYWGQGTLVTVSSGKPGSGKPGSGKPGSGKPGSQAVVTQEPSLTVSPGGTVTLTCGSSTGAVTTSNYANWVQQKPGKSPRGLIGGTNKRAPGVPARFSGSLLGGKAALTISGAQPEDEADYYCALWYSNHWVFGGGTKLTVLGGGGSGGGGSKTHTCPPCPAPPVAGPSVFLFPPKPKDTLMISRTPEVTCVVVDVKHEDPEVKFNWYVDGVEVHNAKTKPREEQYNSTYRVVSVLTVLHQDWLNGKEYKCKVSNKALPAPIEKTISKAKGQPREPQVYTLPPSREQMTKNQVKLTCLVKGFYPSDIAVEWESNGQPENNYKTTPPVLDSDGSFFLYSKLTVDKSRWQQGNVFSCSVLHEALHSHYTQKSLSLSPGK

SEQ ID NO: 335 - protein, 220 aa, Artificial Sequence; identical to SEQ ID NO: 239
  Description of Artificial Sequence: Synthetic polypeptide
  XENC10145 Chain 3 -  [alphaClaudin18.2]_L1

SEQ ID NO: 336 - protein, 447 aa, Artificial Sequence; identical to SEQ ID NO: 333
  Description of Artificial Sequence: Synthetic polypeptide
  XENC10146 Chain 1 -  [alphaClaudin18.2]_H2_IgG1_ C220S/S364K/E357Q/M428L/N434S

SEQ ID NO: 337 - protein, 617 aa, Artificial Sequence
  Description of Artificial Sequence: Synthetic polypeptide
  XENC10146 Chain 2 -  [alphaClaudin18.2]_H2_(G4S)2_ [alphaCD3]_H1.32_L1.47_scFv(GKPGS)4_(G4S)2_IgG1_PVA _/S267K-pI(-)_Isosteric_A_L368D/K370S/M428L/N434S
QVQLVQSGAEVKKPGASVKVSCKASGYTFTSYWINWVRQAPGQGLEWMGNIYPSDSYTNYNQKFQGRVTMTVDKSTSTAYMELSSLRSEDTAVYYCTRSWRGNSFDYWGQGTLVTVSSGGGGSGGGGSEVQLVESGGGLVQPGGSLRLSCAASGFTFSTYAMNWVRQAPGKGLEWVGRIRSKANNYATYYADSVKGRFTISRDDSKNTLYLQMNSLRAEDTAVYYCVRHGNFGDSYVSWFAYWGQGTLVTVSSGKPGSGKPGSGKPGSGKPGSQAVVTQEPSLTVSPGGTVTLTCGSSTGAVTTSNYANWVQQKPGKSPRGLIGGTNKRAPGVPARFSGSLLGGKAALTISGAQPEDEADYYCALWYSNHWVFGGGTKLTVLGGGGSGGGGSKTHTCPPCPAPPVAGPSVFLFPPKPKDTLMISRTPEVTCVVVDVKHEDPEVKFNWYVDGVEVHNAKTKPREEQYNSTYRVVSVLTVLHQDWLNGKEYKCKVSNKALPAPIEKTISKAKGQPREPQVYTLPPSREQMTKNQVKLTCLVKGFYPSDIAVEWESNGQPENNYKTTPPVLDSDGSFFLYSKLTVDKSRWQQGNVFSCSVLHEALHSHYTQKSLSLSPGK

SEQ ID NO: 338 - protein, 220 aa, Artificial Sequence; identical to SEQ ID NO: 239
  Description of Artificial Sequence: Synthetic polypeptide
  XENC10146 Chain 3 -  [alphaClaudin18.2]_L1

SEQ ID NO: 339 - protein, 447 aa, Artificial Sequence; identical to SEQ ID NO: 333
  Description of Artificial Sequence: Synthetic polypeptide
  XENC10147 Chain 1 -  [alphaClaudin18.2]_H2_IgG1_ C220S/S364K/E357Q/M428L/N434S

SEQ ID NO: 340 - protein, 617 aa, Artificial Sequence
  Description of Artificial Sequence: Synthetic polypeptide
  XENC10147 Chain 2 -  [alphaClaudin18.2]_H2_(G4S)2_ [alphaCD3]_H1.89_L1.47_scFv(GKPGS)4_(G4S)2_IgG1_PVA _/S267K-pI(-)_Isosteric_A_L368D/K370S/M428L/N434S
QVQLVQSGAEVKKPGASVKVSCKASGYTFTSYWINWVRQAPGQGLEWMGNIYPSDSYTNYNQKFQGRVTMTVDKSTSTAYMELSSLRSEDTAVYYCTRSWRGNSFDYWGQGTLVTVSSGGGGSGGGGSEVQLVESGGGLVQPGGSLRLSCAASGFTFSTYAMNWVRQAPGKGLEWVGRIRSKYNNYATYYADSVKGRFTISRDDSKNTLYLQMNSLRAEDTAVYYCVRHGNFGDEYVSWFAYWGQGTLVTVSSGKPGSGKPGSGKPGSGKPGSQAVVTQEPSLTVSPGGTVTLTCGSSTGAVTTSNYANWVQQKPGKSPRGLIGGTNKRAPGVPARFSGSLLGGKAALTISGAQPEDEADYYCALWYSNHWVFGGGTKLTVLGGGGSGGGGSKTHTCPPCPAPPVAGPSVFLFPPKPKDTLMISRTPEVTCVVVDVKHEDPEVKFNWYVDGVEVHNAKTKPREEQYNSTYRVVSVLTVLHQDWLNGKEYKCKVSNKALPAPIEKTISKAKGQPREPQVYTLPPSREQMTKNQVKLTCLVKGFYPSDIAVEWESNGQPENNYKTTPPVLDSDGSFFLYSKLTVDKSRWQQGNVFSCSVLHEALHSHYTQKSLSLSPGK

SEQ ID NO: 341 - protein, 220 aa, Artificial Sequence; identical to SEQ ID NO: 239
  Description of Artificial Sequence: Synthetic polypeptide
  XENC10147 Chain 3 -  [alphaClaudin18.2]_L1

SEQ ID NO: 342 - protein, 447 aa, Artificial Sequence; identical to SEQ ID NO: 333
  Description of Artificial Sequence: Synthetic polypeptide
  XENC10148 Chain 1 -  [alphaClaudin18.2]_H2_IgG1_ C220S/S364K/E357Q/M428L/N434S

SEQ ID NO: 343 - protein, 617 aa, Artificial Sequence
  Description of Artificial Sequence: Synthetic polypeptide
  XENC10148 Chain 2 -  [alphaClaudin18.2]_H2_(G4S)2_ [alphaCD3]_H1.90_L1.47_scFv(GKPGS)4_(G4S)2_IgG1_PVA _/S267K-pI(-)_Isosteric_A_L368D/K370S/M428L/N434S
QVQLVQSGAEVKKPGASVKVSCKASGYTFTSYWINWVRQAPGQGLEWMGNIYPSDSYTNYNQKFQGRVTMTVDKSTSTAYMELSSLRSEDTAVYYCTRSWRGNSFDYWGQGTLVTVSSGGGGSGGGGSEVQLVESGGGLVQPGGSLRLSCAASGFTFSTYAMNWVRQAPGKGLEWVGRIRSKYNNYATYYADSVKGRFTISRDDSKNTLYLQMNSLRAEDTAVYYCVRHGNFGDPYVSWFAYWGQGTLVTVSSGKPGSGKPGSGKPGSGKPGSQAVVTQEPSLTVSPGGTVTLTCGSSTGAVTTSNYANWVQQKPGKSPRGLIGGTNKRAPGVPARFSGSLLGGKAALTISGAQPEDEADYYCALWYSNHWVFGGGTKLTVLGGGGSGGGGSKTHTCPPCPAPPVAGPSVFLFPPKPKDTLMISRTPEVTCVVVDVKHEDPEVKFNWYVDGVEVHNAKTKPREEQYNSTYRVVSVLTVLHQDWLNGKEYKCKVSNKALPAPIEKTISKAKGQPREPQVYTLPPSREQMTKNQVKLTCLVKGFYPSDIAVEWESNGQPENNYKTTPPVLDSDGSFFLYSKLTVDKSRWQQGNVFSCSVLHEALHSHYTQKSLSLSPGK

SEQ ID NO: 344 - protein, 220 aa, Artificial Sequence; identical to SEQ ID NO: 239
  Description of Artificial Sequence: Synthetic polypeptide
  XENC10148 Chain 3 -  [alphaClaudin18.2]_L1

SEQ ID NO: 345 - protein, 447 aa, Artificial Sequence; identical to SEQ ID NO: 333
  Description of Artificial Sequence: Synthetic polypeptide
  XENC10149 Chain 1 -  [alphaClaudin18.2]_H2_IgG1_ C220S/S364K/E357Q/M428L/N434S

SEQ ID NO: 346 - protein, 617 aa, Artificial Sequence
  Description of Artificial Sequence: Synthetic polypeptide
  XENC10149 Chain 2 -  [alphaClaudin18.2]_H2_(G4S)2_ [alphaCD3]_H1.33_L1.47_scFv(GKPGS)4_(G4S)2_IgG1_PVA _/S267K-pI(-)_Isosteric_A_L368D/K370S/M428L/N434S
QVQLVQSGAEVKKPGASVKVSCKASGYTFTSYWINWVRQAPGQGLEWMGNIYPSDSYTNYNQKFQGRVTMTVDKSTSTAYMELSSLRSEDTAVYYCTRSWRGNSFDYWGQGTLVTVSSGGGGSGGGGSEVQLVESGGGLVQPGGSLRLSCAASGFTFSTYAMNWVRQAPGKGLEWVGRIRSKYNNYATYYADSVKGRFTISRDDSKNTLYLQMNSLRAEDTAVYYCVRHGNFGDSYVSWFDYWGQGTLVTVSSGKPGSGKPGSGKPGSGKPGSQAVVTQEPSLTVSPGGTVTLTCGSSTGAVTTSNYANWVQQKPGKSPRGLIGGTNKRAPGVPARFSGSLLGGKAALTISGAQPEDEADYYCALWYSNHWVFGGGTKLTVLGGGGSGGGGSKTHTCPPCPAPPVAGPSVFLFPPKPKDTLMISRTPEVTCVVVDVKHEDPEVKFNWYVDGVEVHNAKTKPREEQYNSTYRVVSVLTVLHQDWLNGKEYKCKVSNKALPAPIEKTISKAKGQPREPQVYTLPPSREQMTKNQVKLTCLVKGFYPSDIAVEWESNGQPENNYKTTPPVLDSDGSFFLYSKLTVDKSRWQQGNVFSCSVLHEALHSHYTQKSLSLSPGK

SEQ ID NO: 347 - protein, 220 aa, Artificial Sequence; identical to SEQ ID NO: 239
  Description of Artificial Sequence: Synthetic polypeptide
  XENC10149 Chain 3 -  [alphaClaudin18.2]_L1

SEQ ID NO: 348 - protein, 447 aa, Artificial Sequence; identical to SEQ ID NO: 333
  Description of Artificial Sequence: Synthetic polypeptide
  XENC10150 Chain 1 -  [alphaClaudin18.2]_H2_IgG1_ C220S/S364K/E357Q/M428L/N434S

SEQ ID NO: 349 - protein, 617 aa, Artificial Sequence
  Description of Artificial Sequence: Synthetic polypeptide
  XENC10150 Chain 2 -  [alphaClaudin18.2]_H2_(G4S)2_ [alphaCD3]_H1.31_L1.47_scFv(GKPGS)4_(G4S)2_IgG1_PVA _/S267K-pI(-)_Isosteric_A_L368D/K370S/M428L/N434S
QVQLVQSGAEVKKPGASVKVSCKASGYTFTSYWINWVRQAPGQGLEWMGNIYPSDSYTNYNQKFQGRVTMTVDKSTSTAYMELSSLRSEDTAVYYCTRSWRGNSFDYWGQGTLVTVSSGGGGSGGGGSEVQLVESGGGLVQPGGSLRLSCAASGFTFSTYAMSWVRQAPGKGLEWVGRIRSKYNNYATYYADSVKGRFTISRDDSKNTLYLQMNSLRAEDTAVYYCVRHGNFGDSYVSWFAYWGQGTLVTVSSGKPGSGKPGSGKPGSGKPGSQAVVTQEPSLTVSPGGTVTLTCGSSTGAVTTSNYANWVQQKPGKSPRGLIGGTNKRAPGVPARFSGSLLGGKAALTISGAQPEDEADYYCALWYSNHWVFGGGTKLTVLGGGGSGGGGSKTHTCPPCPAPPVAGPSVFLFPPKPKDTLMISRTPEVTCVVVDVKHEDPEVKFNWYVDGVEVHNAKTKPREEQYNSTYRVVSVLTVLHQDWLNGKEYKCKVSNKALPAPIEKTISKAKGQPREPQVYTLPPSREQMTKNQVKLTCLVKGFYPSDIAVEWESNGQPENNYKTTPPVLDSDGSFFLYSKLTVDKSRWQQGNVFSCSVLHEALHSHYTQKSLSLSPGK

SEQ ID NO: 350 - protein, 220 aa, Artificial Sequence; identical to SEQ ID NO: 239
  Description of Artificial Sequence: Synthetic polypeptide
  XENC10150 Chain 3 -  [alphaClaudin18.2]_L1

SEQ ID NO: 351 - protein, 447 aa, Artificial Sequence; identical to SEQ ID NO: 333
  Description of Artificial Sequence: Synthetic polypeptide
  XENC10151 Chain 1 -  [alphaClaudin18.2]_H2_IgG1_ C220S/S364K/E357Q/M428L/N434S

SEQ ID NO: 352 - protein, 617 aa, Artificial Sequence
  Description of Artificial Sequence: Synthetic polypeptide
  XENC10151 Chain 2 -  [alphaClaudin18.2]_H2_(G4S)2_ [alphaCD3] _L1.47_H1.30_scFv(GKPGS)4_(G4S)2_IgG1_PVA _/S267K-pI(-)_Isosteric_A_L368D/K370S/M428L/N434S
QVQLVQSGAEVKKPGASVKVSCKASGYTFTSYWINWVRQAPGQGLEWMGNIYPSDSYTNYNQKFQGRVTMTVDKSTSTAYMELSSLRSEDTAVYYCTRSWRGNSFDYWGQGTLVTVSSGGGGSGGGGSQAVVTQEPSLTVSPGGTVTLTCGSSTGAVTTSNYANWVQQKPGKSPRGLIGGTNKRAPGVPARFSGSLLGGKAALTISGAQPEDEADYYCALWYSNHWVFGGGTKLTVLGKPGSGKPGSGKPGSGKPGSEVQLVESGGGLVQPGGSLRLSCAASGFTFSTYAMNWVRQAPGKGLEWVGRIRSKYNNYATYYADSVKGRFTISRDDSKNTLYLQMNSLRAEDTAVYYCVRHGNFGDSYVSWFAYWGQGTLVTVSSGGGGSGGGGSKTHTCPPCPAPPVAGPSVFLFPPKPKDTLMISRTPEVTCVVVDVKHEDPEVKFNWYVDGVEVHNAKTKPREEQYNSTYRVVSVLTVLHQDWLNGKEYKCKVSNKALPAPIEKTISKAKGQPREPQVYTLPPSREQMTKNQVKLTCLVKGFYPSDIAVEWESNGQPENNYKTTPPVLDSDGSFFLYSKLTVDKSRWQQGNVFSCSVLHEALHSHYTQKSLSLSPGK

SEQ ID NO: 353 - protein, 220 aa, Artificial Sequence; identical to SEQ ID NO: 239
  Description of Artificial Sequence: Synthetic polypeptide
  XENC10151 Chain 3 -  [alphaClaudin18.2]_L1

SEQ ID NO: 354 - protein, 447 aa, Artificial Sequence; identical to SEQ ID NO: 333
  Description of Artificial Sequence: Synthetic polypeptide
  XENC10152 Chain 1 -  [alphaClaudin18.2]_H2_IgG1_ C220S/S364K/E357Q/M428L/N434S

SEQ ID NO: 355 - protein, 617 aa, Artificial Sequence
  Description of Artificial Sequence: Synthetic polypeptide
  XENC10152 Chain 2 -  [alphaClaudin18.2]_H2_(G4S)2_ [alphaCD3] _L1.47_H1.32_scFv(GKPGS)4_(G4S)2_IgG1_PVA _/S267K-pI(-)_Isosteric_A_L368D/K370S/M428L/N434S
QVQLVQSGAEVKKPGASVKVSCKASGYTFTSYWINWVRQAPGQGLEWMGNIYPSDSYTNYNQKFQGRVTMTVDKSTSTAYMELSSLRSEDTAVYYCTRSWRGNSFDYWGQGTLVTVSSGGGGSGGGGSQAVVTQEPSLTVSPGGTVTLTCGSSTGAVTTSNYANWVQQKPGKSPRGLIGGTNKRAPGVPARFSGSLLGGKAALTISGAQPEDEADYYCALWYSNHWVFGGGTKLTVLGKPGSGKPGSGKPGSGKPGSEVQLVESGGGLVQPGGSLRLSCAASGFTFSTYAMNWVRQAPGKGLEWVGRIRSKANNYATYYADSVKGRFTISRDDSKNTLYLQMNSLRAEDTAVYYCVRHGNFGDSYVSWFAYWGQGTLVTVSSGGGGSGGGGSKTHTCPPCPAPPVAGPSVFLFPPKPKDTLMISRTPEVTCVVVDVKHEDPEVKFNWYVDGVEVHNAKTKPREEQYNSTYRVVSVLTVLHQDWLNGKEYKCKVSNKALPAPIEKTISKAKGQPREPQVYTLPPSREQMTKNQVKLTCLVKGFYPSDIAVEWESNGQPENNYKTTPPVLDSDGSFFLYSKLTVDKSRWQQGNVFSCSVLHEALHSHYTQKSLSLSPGK

SEQ ID NO: 356 - protein, 220 aa, Artificial Sequence; identical to SEQ ID NO: 239
  Description of Artificial Sequence: Synthetic polypeptide
  XENC10152 Chain 3 -  [alphaClaudin18.2]_L1

SEQ ID NO: 357 - protein, 447 aa, Artificial Sequence; identical to SEQ ID NO: 333
  Description of Artificial Sequence: Synthetic polypeptide
  XENC10153 Chain 1 -  [alphaClaudin18.2]_H2_IgG1_ C220S/S364K/E357Q/M428L/N434S

SEQ ID NO: 358 - protein, 617 aa, Artificial Sequence
  Description of Artificial Sequence: Synthetic polypeptide
  XENC10153 Chain 2 -  [alphaClaudin18.2]_H2_(G4S)2_ [alphaCD3] _L1.47_H1.89_scFv(GKPGS)4_(G4S)2_IgG1_PVA _/S267K-pI(-)_Isosteric_A_L368D/K370S/M428L/N434S
QVQLVQSGAEVKKPGASVKVSCKASGYTFTSYWINWVRQAPGQGLEWMGNIYPSDSYTNYNQKFQGRVTMTVDKSTSTAYMELSSLRSEDTAVYYCTRSWRGNSFDYWGQGTLVTVSSGGGGSGGGGSQAVVTQEPSLTVSPGGTVTLTCGSSTGAVTTSNYANWVQQKPGKSPRGLIGGTNKRAPGVPARFSGSLLGGKAALTISGAQPEDEADYYCALWYSNHWVFGGGTKLTVLGKPGSGKPGSGKPGSGKPGSEVQLVESGGGLVQPGGSLRLSCAASGFTFSTYAMNWVRQAPGKGLEWVGRIRSKYNNYATYYADSVKGRFTISRDDSKNTLYLQMNSLRAEDTAVYYCVRHGNFGDEYVSWFAYWGQGTLVTVSSGGGGSGGGGSKTHTCPPCPAPPVAGPSVFLFPPKPKDTLMISRTPEVTCVVVDVKHEDPEVKFNWYVDGVEVHNAKTKPREEQYNSTYRVVSVLTVLHQDWLNGKEYKCKVSNKALPAPIEKTISKAKGQPREPQVYTLPPSREQMTKNQVKLTCLVKGFYPSDIAVEWESNGQPENNYKTTPPVLDSDGSFFLYSKLTVDKSRWQQGNVFSCSVLHEALHSHYTQKSLSLSPGK

SEQ ID NO: 359 - protein, 220 aa, Artificial Sequence; identical to SEQ ID NO: 239
  Description of Artificial Sequence: Synthetic polypeptide
  XENC10153 Chain 3 -  [alphaClaudin18.2]_L1

SEQ ID NO: 360 - protein, 447 aa, Artificial Sequence; identical to SEQ ID NO: 333
  Description of Artificial Sequence: Synthetic polypeptide
  XENC10154 Chain 1 -  [alphaClaudin18.2]_H2_IgG1_ C220S/S364K/E357Q/M428L/N434S

SEQ ID NO: 361 - protein, 617 aa, Artificial Sequence
  Description of Artificial Sequence: Synthetic polypeptide
  XENC10154 Chain 2 -  [alphaClaudin18.2]_H2_(G4S)2_ [alphaCD3] _L1.47_H1.90_scFv(GKPGS)4_(G4S)2_IgG1_PVA _/S267K-pI(-)_Isosteric_A_L368D/K370S/M428L/N434S
QVQLVQSGAEVKKPGASVKVSCKASGYTFTSYWINWVRQAPGQGLEWMGNIYPSDSYTNYNQKFQGRVTMTVDKSTSTAYMELSSLRSEDTAVYYCTRSWRGNSFDYWGQGTLVTVSSGGGGSGGGGSQAVVTQEPSLTVSPGGTVTLTCGSSTGAVTTSNYANWVQQKPGKSPRGLIGGTNKRAPGVPARFSGSLLGGKAALTISGAQPEDEADYYCALWYSNHWVFGGGTKLTVLGKPGSGKPGSGKPGSGKPGSEVQLVESGGGLVQPGGSLRLSCAASGFTFSTYAMNWVRQAPGKGLEWVGRIRSKYNNYATYYADSVKGRFTISRDDSKNTLYLQMNSLRAEDTAVYYCVRHGNFGDPYVSWFAYWGQGTLVTVSSGGGGSGGGGSKTHTCPPCPAPPVAGPSVFLFPPKPKDTLMISRTPEVTCVVVDVKHEDPEVKFNWYVDGVEVHNAKTKPREEQYNSTYRVVSVLTVLHQDWLNGKEYKCKVSNKALPAPIEKTISKAKGQPREPQVYTLPPSREQMTKNQVKLTCLVKGFYPSDIAVEWESNGQPENNYKTTPPVLDSDGSFFLYSKLTVDKSRWQQGNVFSCSVLHEALHSHYTQKSLSLSPGK

SEQ ID NO: 362 - protein, 220 aa, Artificial Sequence; identical to SEQ ID NO: 239
  Description of Artificial Sequence: Synthetic polypeptide
  XENC10154 Chain 3 -  [alphaClaudin18.2]_L1

SEQ ID NO: 363 - protein, 447 aa, Artificial Sequence; identical to SEQ ID NO: 333
  Description of Artificial Sequence: Synthetic polypeptide
  XENC10155 Chain 1 -  [alphaClaudin18.2]_H2_IgG1_ C220S/S364K/E357Q/M428L/N434S

SEQ ID NO: 364 - protein, 617 aa, Artificial Sequence
  Description of Artificial Sequence: Synthetic polypeptide
  XENC10155 Chain 2 -  [alphaClaudin18.2]_H2_(G4S)2_ [alphaCD3] _L1.47_H1.33_scFv(GKPGS)4_(G4S)2_IgG1_PVA _/S267K-pI(-)_Isosteric_A_L368D/K370S/M428L/N434S
QVQLVQSGAEVKKPGASVKVSCKASGYTFTSYWINWVRQAPGQGLEWMGNIYPSDSYTNYNQKFQGRVTMTVDKSTSTAYMELSSLRSEDTAVYYCTRSWRGNSFDYWGQGTLVTVSSGGGGSGGGGSQAVVTQEPSLTVSPGGTVTLTCGSSTGAVTTSNYANWVQQKPGKSPRGLIGGTNKRAPGVPARFSGSLLGGKAALTISGAQPEDEADYYCALWYSNHWVFGGGTKLTVLGKPGSGKPGSGKPGSGKPGSEVQLVESGGGLVQPGGSLRLSCAASGFTFSTYAMNWVRQAPGKGLEWVGRIRSKYNNYATYYADSVKGRFTISRDDSKNTLYLQMNSLRAEDTAVYYCVRHGNFGDSYVSWFDYWGQGTLVTVSSGGGGSGGGGSKTHTCPPCPAPPVAGPSVFLFPPKPKDTLMISRTPEVTCVVVDVKHEDPEVKFNWYVDGVEVHNAKTKPREEQYNSTYRVVSVLTVLHQDWLNGKEYKCKVSNKALPAPIEKTISKAKGQPREPQVYTLPPSREQMTKNQVKLTCLVKGFYPSDIAVEWESNGQPENNYKTTPPVLDSDGSFFLYSKLTVDKSRWQQGNVFSCSVLHEALHSHYTQKSLSLSPGK

SEQ ID NO: 365 - protein, 220 aa, Artificial Sequence; identical to SEQ ID NO: 239
  Description of Artificial Sequence: Synthetic polypeptide
  XENC10155 Chain 3 -  [alphaClaudin18.2]_L1

SEQ ID NO: 366 - protein, 447 aa, Artificial Sequence; identical to SEQ ID NO: 333
  Description of Artificial Sequence: Synthetic polypeptide
  XENC10156 Chain 1 -  [alphaClaudin18.2]_H2_IgG1_ C220S/S364K/E357Q/M428L/N434S

SEQ ID NO: 367 - protein, 617 aa, Artificial Sequence
  Description of Artificial Sequence: Synthetic polypeptide
  XENC10156 Chain 2 -  [alphaClaudin18.2]_H2_(G4S)2_ [alphaCD3] _L1.47_H1.31_scFv(GKPGS)4_(G4S)2_IgG1_PVA _/S267K-pI(-)_Isosteric_A_L368D/K370S/M428L/N434S
QVQLVQSGAEVKKPGASVKVSCKASGYTFTSYWINWVRQAPGQGLEWMGNIYPSDSYTNYNQKFQGRVTMTVDKSTSTAYMELSSLRSEDTAVYYCTRSWRGNSFDYWGQGTLVTVSSGGGGSGGGGSQAVVTQEPSLTVSPGGTVTLTCGSSTGAVTTSNYANWVQQKPGKSPRGLIGGTNKRAPGVPARFSGSLLGGKAALTISGAQPEDEADYYCALWYSNHWVFGGGTKLTVLGKPGSGKPGSGKPGSGKPGSEVQLVESGGGLVQPGGSLRLSCAASGFTFSTYAMSWVRQAPGKGLEWVGRIRSKYNNYATYYADSVKGRFTISRDDSKNTLYLQMNSLRAEDTAVYYCVRHGNFGDSYVSWFAYWGQGTLVTVSSGGGGSGGGGSKTHTCPPCPAPPVAGPSVFLFPPKPKDTLMISRTPEVTCVVVDVKHEDPEVKFNWYVDGVEVHNAKTKPREEQYNSTYRVVSVLTVLHQDWLNGKEYKCKVSNKALPAPIEKTISKAKGQPREPQVYTLPPSREQMTKNQVKLTCLVKGFYPSDIAVEWESNGQPENNYKTTPPVLDSDGSFFLYSKLTVDKSRWQQGNVFSCSVLHEALHSHYTQKSLSLSPGK

SEQ ID NO: 368 - protein, 220 aa, Artificial Sequence; identical to SEQ ID NO: 239
  Description of Artificial Sequence: Synthetic polypeptide
  XENC10156 Chain 3 -  [alphaClaudin18.2]_L1

SEQ ID NO: 369 - protein, 449 aa, Artificial Sequence
  Description of Artificial Sequence: Synthetic polypeptide
  XENP13245 Chain 1 -  Numax_IgG1_C220S/S364K/E357Q
QVTLRESGPALVKPTQTLTLTCTFSGFSLSTAGMSVGWIRQPPGKALEWLADIWWDDKKHYNPSLKDRLTISKDTSKNQVVLKVTNMDPADTATYYCARDMIFNFYFDVWGQGTTVTVSSASTKGPSVFPLAPSSKSTSGGTAALGCLVKDYFPEPVTVSWNSGALTSGVHTFPAVLQSSGLYSLSSVVTVPSSSLGTQTYICNVNHKPSDTKVDKKVEPKSCDKTHTCPPCPAPPVAGPSVFLFPPKPKDTLMISRTPEVTCVVVDVKHEDPEVKFNWYVDGVEVHNAKTKPREEEYNSTYRVVSVLTVLHQDWLNGKEYKCKVSNKALPAPIEKTISKAKGQPREPQVYTLPPSREEMTKNQVSLTCDVSGFYPSDIAVEWESDGQPENNYKTTPPVLDSDGSFFLYSKLTVDKSRWEQGDVFSCSVMHEALHNHYTQKSLSLSPGK

SEQ ID NO: 370 - protein, 485 aa, Artificial Sequence; identical to SEQ ID NO: 154
  Description of Artificial Sequence: Synthetic polypeptide
  XENP13245 Chain 2 -  [alphaCD3]_H1.30_L1.47_scFv(GKPGS)4_ Fc(216)_IgG1_PVA_/S267K_pI(-)_Isosteric_A_L368D/K370S

SEQ ID NO: 371 - protein, 213 aa, Artificial Sequence
  Description of Artificial Sequence: Synthetic polypeptide
  XENP13245 Chain 3 -  Numax Light
DIQMTQSPSTLSASVGDRVTITCSASSRVGYMHWYQQKPGKAPKLLIYDTSKLASGVPSRFSGSGSGTEFTLTISSLQPDDFATYYCFQGSGYPFTFGGGTKVEIKRTVAAPSVFIFPPSDEQLKSGTASVVCLLNNFYPREAKVQWKVDNALQSGNSQESVTEQDSKDSTYSLSSTLTLSKADYEKHKVYACEVTHQGLSSPVTKSFNRGEC

SEQ ID NO: 372 - protein, 447 aa, Artificial Sequence
  Description of Artificial Sequence: Synthetic polypeptide
  XENP29470 Heavy Chain - [alphaClaudin18.2]_H1_IgG1_PVA_/S267K
EVQLVQSGAEVKKPGESLRISCKASGYTFTSYWINWVRQMPGKGLEWMGNIYPSDSYTNYNQKFQGHVTISVDKSISTAYLQWSSLKASDTAMYYCTRSWRGNSFDYWGQGTLVTVSSASTKGPSVFPLAPSSKSTSGGTAALGCLVKDYFPEPVTVSWNSGALTSGVHTFPAVLQSSGLYSLSSVVTVPSSSLGTQTYICNVNHKPSNTKVDKKVEPKSCDKTHTCPPCPAPPVAGPSVFLFPPKPKDTLMISRTPEVTCVVVDVKHEDPEVKFNWYVDGVEVHNAKTKPREEQYNSTYRVVSVLTVLHQDWLNGKEYKCKVSNKALPAPIEKTISKAKGQPREPQVYTLPPSREEMTKNQVSLTCLVKGFYPSDIAVEWESNGQPENNYKTTPPVLDSDGSFFLYSKLTVDKSRWQQGNVFSCSVMHEALHNHYTQKSLSLSPGK

SEQ ID NO: 373 - protein, 220 aa, Artificial Sequence; identical to SEQ ID NO: 239
  Description of Artificial Sequence: Synthetic polypeptide
  XENP29470 Light Chain - [alphaClaudin18.2]_L1

SEQ ID NO: 374 - protein, 447 aa, Artificial Sequence
  Description of Artificial Sequence: Synthetic polypeptide
  XENP29471 Heavy Chain - [alphaClaudin18.2]_H2_IgG1_PVA_/S267K
QVQLVQSGAEVKKPGASVKVSCKASGYTFTSYWINWVRQAPGQGLEWMGNIYPSDSYTNYNQKFQGRVTMTVDKSTSTAYMELSSLRSEDTAVYYCTRSWRGNSFDYWGQGTLVTVSSASTKGPSVFPLAPSSKSTSGGTAALGCLVKDYFPEPVTVSWNSGALTSGVHTFPAVLQSSGLYSLSSVVTVPSSSLGTQTYICNVNHKPSNTKVDKKVEPKSCDKTHTCPPCPAPPVAGPSVFLFPPKPKDTLMISRTPEVTCVVVDVKHEDPEVKFNWYVDGVEVHNAKTKPREEQYNSTYRVVSVLTVLHQDWLNGKEYKCKVSNKALPAPIEKTISKAKGQPREPQVYTLPPSREEMTKNQVSLTCLVKGFYPSDIAVEWESNGQPENNYKTTPPVLDSDGSFFLYSKLTVDKSRWQQGNVFSCSVMHEALHNHYTQKSLSLSPGK

SEQ ID NO: 375 - protein, 220 aa, Artificial Sequence; identical to SEQ ID NO: 239
  Description of Artificial Sequence: Synthetic polypeptide
  XENP29471 Light Chain - [alphaClaudin18.2]_L1

SEQ ID NO: 376 - protein, 447 aa, Artificial Sequence; identical to SEQ ID NO: 237
  Description of Artificial Sequence: Synthetic polypeptide
  XENP29472 Chain 1 -  [alphaClaudin18.2]_H1_IgG1_pI(-)_ Isosteric_A_/PVA_/S267K/L368D/K370S

SEQ ID NO: 377 - protein, 485 aa, Artificial Sequence; identical to SEQ ID NO: 154
  Description of Artificial Sequence: Synthetic polypeptide
  XENP29472 Chain 2 -  [alphaClaudin18.2]_H1_[alphaCD3]_ H1.30_L1.47_scFv(GKPGS)4_Fc(216)_IgG1_C220S/PVA _/S267K/S364K/E357Q

SEQ ID NO: 378 - protein, 220 aa, Artificial Sequence; identical to SEQ ID NO: 239
  Description of Artificial Sequence: Synthetic polypeptide
  XENP29472 Chain 3 -  [alphaClaudin18.2]_L1

SEQ ID NO: 379 - protein, 447 aa, Artificial Sequence; identical to SEQ ID NO: 303
  Description of Artificial Sequence: Synthetic polypeptide
  XENP29473 Chain 1 -  [alphaClaudin18.2]_H2_IgG1_pI(-)_ Isosteric_A_/PVA_/S267K/L368D/K370S

SEQ ID NO: 380 - protein, 485 aa, Artificial Sequence; identical to SEQ ID NO: 154
  Description of Artificial Sequence: Synthetic polypeptide
  XENP29473 Chain 2 -  [alphaClaudin18.2]_H2_[alphaCD3]_ H1.30_L1.47_scFv(GKPGS)4_Fc(216)_IgG1_C220S/PVA _/S267K/S364K/E357Q

SEQ ID NO: 381 - protein, 220 aa, Artificial Sequence; identical to SEQ ID NO: 239
  Description of Artificial Sequence: Synthetic polypeptide
  XENP29473 Chain 3 -  [alphaClaudin18.2]_L1

SEQ ID NO: 382 - protein, 447 aa, Artificial Sequence; identical to SEQ ID NO: 237
  Description of Artificial Sequence: Synthetic polypeptide
  XENP29474 Chain 1 -  [alphaClaudin18.2]_H1_IgG1_pI(-)_ Isosteric_A_/PVA_/S267K/L368D/K370S

SEQ ID NO: 383 - protein, 485 aa, Artificial Sequence; identical to SEQ ID NO: 157
  Description of Artificial Sequence: Synthetic polypeptide
  XENP29474 Chain 2 -  [alphaClaudin18.2]_H1_[alphaCD3]_ H1.32_L1.47_scFv(GKPGS)4_Fc(216)_IgG1_C220S/PVA _/S267K/S364K/E357Q

SEQ ID NO: 384 - protein, 220 aa, Artificial Sequence; identical to SEQ ID NO: 239
  Description of Artificial Sequence: Synthetic polypeptide
  XENP29474 Chain 3 -  [alphaClaudin18.2]_L1

SEQ ID NO: 385 - protein, 447 aa, Artificial Sequence; identical to SEQ ID NO: 303
  Description of Artificial Sequence: Synthetic polypeptide
  XENP29475 Chain 1 -  [alphaClaudin18.2]_H2_IgG1_pI(-)_ Isosteric_A_/PVA_/S267K/L368D/K370S

SEQ ID NO: 386 - protein, 485 aa, Artificial Sequence; identical to SEQ ID NO: 157
  Description of Artificial Sequence: Synthetic polypeptide
  XENP29475 Chain 2 -  [alphaClaudin18.2]_H2_[alphaCD3]_ H1.32_L1.47_scFv(GKPGS)4_Fc(216)_IgG1_C220S/PVA _/S267K/S364K/E357Q

SEQ ID NO: 387 - protein, 220 aa, Artificial Sequence; identical to SEQ ID NO: 239
  Description of Artificial Sequence: Synthetic polypeptide
  XENP29475 Chain 3 -  [alphaClaudin18.2]_L1

SEQ ID NO: 388 - protein, 447 aa, Artificial Sequence; identical to SEQ ID NO: 237
  Description of Artificial Sequence: Synthetic polypeptide
  XENP29476 Chain 1 -  [alphaClaudin18.2]_H1_IgG1_pI(-)_ Isosteric_A_/PVA_/S267K/L368D/K370S

SEQ ID NO: 389 - protein, 720 aa, Artificial Sequence
  Description of Artificial Sequence: Synthetic polypeptide
  XENP29476 Chain 2 -  [alphaClaudin18.2]_H1_[alphaCD3]_ H1.30_L1.47_scFv(GKPGS)4_Fc(216)_IgG1_C220S/PVA _/S267K/S364K/E357Q
EVQLVQSGAEVKKPGESLRISCKASGYTFTSYWINWVRQMPGKGLEWMGNIYPSDSYTNYNQKFQGHVTISVDKSISTAYLQWSSLKASDTAMYYCTRSWRGNSFDYWGQGTLVTVSSASTKGPSVFPLAPSSKSTSGGTAALGCLVKDYFPEPVTVSWNSGALTSGVHTFPAVLQSSGLYSLSSVVTVPSSSLGTQTYICNVNHKPSNTKVDKKVEPKSCGGGGSGGGGSEVQLVESGGGLVQPGGSLRLSCAASGFTFSTYAMNWVRQAPGKGLEWVGRIRSKYNNYATYYADSVKGRFTISRDDSKNTLYLQMNSLRAEDTAVYYCVRHGNFGDSYVSWFAYWGQGTLVTVSSGKPGSGKPGSGKPGSGKPGSQAVVTQEPSLTVSPGGTVTLTCGSSTGAVTTSNYANWVQQKPGKSPRGLIGGTNKRAPGVPARFSGSLLGGKAALTISGAQPEDEADYYCALWYSNHWVFGGGTKLTVLGGGGSGGGGSKTHTCPPCPAPPVAGPSVFLFPPKPKDTLMISRTPEVTCVVVDVKHEDPEVKFNWYVDGVEVHNAKTKPREEQYNSTYRVVSVLTVLHQDWLNGKEYKCKVSNKALPAPIEKTISKAKGQPREPQVYTLPPSREQMTKNQVKLTCLVKGFYPSDIAVEWESNGQPENNYKTTPPVLDSDGSFFLYSKLTVDKSRWQQGNVFSCSVMHEALHNHYTQKSLSLSPGK

SEQ ID NO: 390 - protein, 220 aa, Artificial Sequence; identical to SEQ ID NO: 239
  Description of Artificial Sequence: Synthetic polypeptide
  XENP29476 Chain 3 -  [alphaClaudin18.2]_L1

SEQ ID NO: 391 - protein, 447 aa, Artificial Sequence; identical to SEQ ID NO: 303
  Description of Artificial Sequence: Synthetic polypeptide
  XENP29477 Chain 1 -  [alphaClaudin18.2]_H2_IgG1_pI(-)_ Isosteric_A_/PVA_/S267K/L368D/K370S

SEQ ID NO: 392 - protein, 720 aa, Artificial Sequence
  Description of Artificial Sequence: Synthetic polypeptide
  XENP29477 Chain 2 -  [alphaClaudin18.2]_H2_Fab_[alphaCD3]_ H1.30_L1.47_scFv(GKPGS)4_Fc(216)_IgG1_C220S/PVA _/S267K/S364K/E357Q
QVQLVQSGAEVKKPGASVKVSCKASGYTFTSYWINWVRQAPGQGLEWMGNIYPSDSYTNYNQKFQGRVTMTVDKSTSTAYMELSSLRSEDTAVYYCTRSWRGNSFDYWGQGTLVTVSSASTKGPSVFPLAPSSKSTSGGTAALGCLVKDYFPEPVTVSWNSGALTSGVHTFPAVLQSSGLYSLSSVVTVPSSSLGTQTYICNVNHKPSNTKVDKKVEPKSCGGGGSGGGGSEVQLVESGGGLVQPGGSLRLSCAASGFTFSTYAMNWVRQAPGKGLEWVGRIRSKYNNYATYYADSVKGRFTISRDDSKNTLYLQMNSLRAEDTAVYYCVRHGNFGDSYVSWFAYWGQGTLVTVSSGKPGSGKPGSGKPGSGKPGSQAVVTQEPSLTVSPGGTVTLTCGSSTGAVTTSNYANWVQQKPGKSPRGLIGGTNKRAPGVPARFSGSLLGGKAALTISGAQPEDEADYYCALWYSNHWVFGGGTKLTVLGGGGSGGGGSKTHTCPPCPAPPVAGPSVFLFPPKPKDTLMISRTPEVTCVVVDVKHEDPEVKFNWYVDGVEVHNAKTKPREEQYNSTYRVVSVLTVLHQDWLNGKEYKCKVSNKALPAPIEKTISKAKGQPREPQVYTLPPSREQMTKNQVKLTCLVKGFYPSDIAVEWESNGQPENNYKTTPPVLDSDGSFFLYSKLTVDKSRWQQGNVFSCSVMHEALHNHYTQKSLSLSPGK

SEQ ID NO: 393 - protein, 220 aa, Artificial Sequence; identical to SEQ ID NO: 239
  Description of Artificial Sequence: Synthetic polypeptide
  XENP29477 Chain 3 -  [alphaClaudin18.2]_L1

SEQ ID NO: 394 - protein, 447 aa, Artificial Sequence; identical to SEQ ID NO: 237
  Description of Artificial Sequence: Synthetic polypeptide
  XENP29478 Chain 1 -  [alphaClaudin18.2]_H1_IgG1_pI(-)_ Isosteric_A_/PVA_/S267K/L368D/K370S

SEQ ID NO: 395 - protein, 720 aa, Artificial Sequence
  Description of Artificial Sequence: Synthetic polypeptide
  XENP29478 Chain 2 -  [alphaClaudin18.2]_H1_[alphaCD3]_ H1.32_L1.47_scFv(GKPGS)4_Fc(216)_IgG1_C220S/PVA _/S267K/S364K/E357Q
EVQLVQSGAEVKKPGESLRISCKASGYTFTSYWINWVRQMPGKGLEWMGNIYPSDSYTNYNQKFQGHVTISVDKSISTAYLQWSSLKASDTAMYYCTRSWRGNSFDYWGQGTLVTVSSASTKGPSVFPLAPSSKSTSGGTAALGCLVKDYFPEPVTVSWNSGALTSGVHTFPAVLQSSGLYSLSSVVTVPSSSLGTQTYICNVNHKPSNTKVDKKVEPKSCGGGGSGGGGSEVQLVESGGGLVQPGGSLRLSCAASGFTFSTYAMNWVRQAPGKGLEWVGRIRSKANNYATYYADSVKGRFTISRDDSKNTLYLQMNSLRAEDTAVYYCVRHGNFGDSYVSWFAYWGQGTLVTVSSGKPGSGKPGSGKPGSGKPGSQAVVTQEPSLTVSPGGTVTLTCGSSTGAVTTSNYANWVQQKPGKSPRGLIGGTNKRAPGVPARFSGSLLGGKAALTISGAQPEDEADYYCALWYSNHWVFGGGTKLTVLGGGGSGGGGSKTHTCPPCPAPPVAGPSVFLFPPKPKDTLMISRTPEVTCVVVDVKHEDPEVKFNWYVDGVEVHNAKTKPREEQYNSTYRVVSVLTVLHQDWLNGKEYKCKVSNKALPAPIEKTISKAKGQPREPQVYTLPPSREQMTKNQVKLTCLVKGFYPSDIAVEWESNGQPENNYKTTPPVLDSDGSFFLYSKLTVDKSRWQQGNVFSCSVMHEALHNHYTQKSLSLSPGK

SEQ ID NO: 396 - protein, 220 aa, Artificial Sequence; identical to SEQ ID NO: 239
  Description of Artificial Sequence: Synthetic polypeptide
  XENP29478 Chain 3 -  [alphaClaudin18.2]_L1

SEQ ID NO: 397 - protein, 447 aa, Artificial Sequence; identical to SEQ ID NO: 303
  Description of Artificial Sequence: Synthetic polypeptide
  XENP29479 Chain 1 -  [alphaClaudin18.2]_H2_IgG1_pI(-)_ Isosteric_A_/PVA_/S267K/L368D/K370S

SEQ ID NO: 398 - protein, 720 aa, Artificial Sequence
  Description of Artificial Sequence: Synthetic polypeptide
  XENP29479 Chain 2 -  [alphaClaudin18.2]_H2_[alphaCD3]_ H1.32_L1.47_scFv(GKPGS)4_Fc(216)_IgG1_C220S/PVA _/S267K/S364K/E357Q
QVQLVQSGAEVKKPGASVKVSCKASGYTFTSYWINWVRQAPGQGLEWMGNIYPSDSYTNYNQKFQGRVTMTVDKSTSTAYMELSSLRSEDTAVYYCTRSWRGNSFDYWGQGTLVTVSSASTKGPSVFPLAPSSKSTSGGTAALGCLVKDYFPEPVTVSWNSGALTSGVHTFPAVLQSSGLYSLSSVVTVPSSSLGTQTYICNVNHKPSNTKVDKKVEPKSCGGGGSGGGGSEVQLVESGGGLVQPGGSLRLSCAASGFTFSTYAMNWVRQAPGKGLEWVGRIRSKANNYATYYADSVKGRFTISRDDSKNTLYLQMNSLRAEDTAVYYCVRHGNFGDSYVSWFAYWGQGTLVTVSSGKPGSGKPGSGKPGSGKPGSQAVVTQEPSLTVSPGGTVTLTCGSSTGAVTTSNYANWVQQKPGKSPRGLIGGTNKRAPGVPARFSGSLLGGKAALTISGAQPEDEADYYCALWYSNHWVFGGGTKLTVLGGGGSGGGGSKTHTCPPCPAPPVAGPSVFLFPPKPKDTLMISRTPEVTCVVVDVKHEDPEVKFNWYVDGVEVHNAKTKPREEQYNSTYRVVSVLTVLHQDWLNGKEYKCKVSNKALPAPIEKTISKAKGQPREPQVYTLPPSREQMTKNQVKLTCLVKGFYPSDIAVEWESNGQPENNYKTTPPVLDSDGSFFLYSKLTVDKSRWQQGNVFSCSVMHEALHNHYTQKSLSLSPGK

SEQ ID NO: 399 - protein, 220 aa, Artificial Sequence; identical to SEQ ID NO: 239
  Description of Artificial Sequence: Synthetic polypeptide
  XENP29479 Chain 3 -  [alphaClaudin18.2]_L1

SEQ ID NO: 400 - protein, 329 aa, Artificial Sequence; identical to SEQ ID NO: 32
  Description of Artificial Sequence: Synthetic polypeptide
  2+1 - H1.30_L1.47 - no Xtend Chain 1

SEQ ID NO: 401 - protein, 489 aa, Artificial Sequence
  Description of Artificial Sequence: Synthetic polypeptide
  2+1 - H1.30_L1.47 - no Xtend Chain 2
EVQLVESGGGLVQPGGSLRLSCAASGFTFSTYAMNWVRQAPGKGLEWVGRIRSKYNNYATYYADSVKGRFTISRDDSKNTLYLQMNSLRAEDTAVYYCVRHGNFGDSYVSWFAYWGQGTLVTVSSGKPGSGKPGSGKPGSGKPGSQAVVTQEPSLTVSPGGTVTLTCGSSTGAVTTSNYANWVQQKPGKSPRGLIGGTNKRAPGVPARFSGSLLGGKAALTISGAQPEDEADYYCALWYSNHWVFGGGTKLTVLGGGGSGGGGSKTHTCPPCPAPPVAGPSVFLFPPKPKDTLMISRTPEVTCVVVDVKHEDPEVKFNWYVDGVEVHNAKTKPREEQYNSTYRVVSVLTVLHQDWLNGKEYKCKVSNKALPAPIEKTISKAKGQPREPQVYTLPPSREQMTKNQVKLTCLVKGFYPSDIAVEWESNGQPENNYKTTPPVLDSDGSFFLYSKLTVDKSRWQQGNVFSCSVMHEALHNHYTQKSLSLSPGK

SEQ ID NO: 402 - protein, 107 aa, Artificial Sequence [sequence omitted]

SEQ ID NO: 403 - protein, 329 aa, Artificial Sequence; identical to SEQ ID NO: 32
  Description of Artificial Sequence: Synthetic polypeptide
  2+1 - H1.32_L1.47 - no Xtend Chain 1

SEQ ID NO: 404 - protein, 489 aa, Artificial Sequence
  Description of Artificial Sequence: Synthetic polypeptide
  2+1 - H1.32_L1.47 - no Xtend Chain 2
EVQLVESGGGLVQPGGSLRLSCAASGFTFSTYAMNWVRQAPGKGLEWVGRIRSKANNYATYYADSVKGRFTISRDDSKNTLYLQMNSLRAEDTAVYYCVRHGNFGDSYVSWFAYWGQGTLVTVSSGKPGSGKPGSGKPGSGKPGSQAVVTQEPSLTVSPGGTVTLTCGSSTGAVTTSNYANWVQQKPGKSPRGLIGGTNKRAPGVPARFSGSLLGGKAALTISGAQPEDEADYYCALWYSNHWVFGGGTKLTVLGGGGSGGGGSKTHTCPPCPAPPVAGPSVFLFPPKPKDTLMISRTPEVTCVVVDVKHEDPEVKFNWYVDGVEVHNAKTKPREEQYNSTYRVVSVLTVLHQDWLNGKEYKCKVSNKALPAPIEKTISKAKGQPREPQVYTLPPSREQMTKNQVKLTCLVKGFYPSDIAVEWESNGQPENNYKTTPPVLDSDGSFFLYSKLTVDKSRWQQGNVFSCSVMHEALHNHYTQKSLSLSPGK

SEQ ID NO: 405 - protein, 107 aa, Artificial Sequence [sequence omitted]

SEQ ID NO: 406 - protein, 329 aa, Artificial Sequence; identical to SEQ ID NO: 32
  Description of Artificial Sequence: Synthetic polypeptide
  2+1 - H1.89_L1.47 - no Xtend Chain 1

SEQ ID NO: 407 - protein, 489 aa, Artificial Sequence
  Description of Artificial Sequence: Synthetic polypeptide
  2+1 - H1.89_L1.47 - no Xtend Chain 2
EVQLVESGGGLVQPGGSLRLSCAASGFTFSTYAMNWVRQAPGKGLEWVGRIRSKYNNYATYYADSVKGRFTISRDDSKNTLYLQMNSLRAEDTAVYYCVRHGNFGDEYVSWFAYWGQGTLVTVSSGKPGSGKPGSGKPGSGKPGSQAVVTQEPSLTVSPGGTVTLTCGSSTGAVTTSNYANWVQQKPGKSPRGLIGGTNKRAPGVPARFSGSLLGGKAALTISGAQPEDEADYYCALWYSNHWVFGGGTKLTVLGGGGSGGGGSKTHTCPPCPAPPVAGPSVFLFPPKPKDTLMISRTPEVTCVVVDVKHEDPEVKFNWYVDGVEVHNAKTKPREEQYNSTYRVVSVLTVLHQDWLNGKEYKCKVSNKALPAPIEKTISKAKGQPREPQVYTLPPSREQMTKNQVKLTCLVKGFYPSDIAVEWESNGQPENNYKTTPPVLDSDGSFFLYSKLTVDKSRWQQGNVFSCSVMHEALHNHYTQKSLSLSPGK

SEQ ID NO: 408 - protein, 107 aa, Artificial Sequence [sequence omitted]

SEQ ID NO: 409 - protein, 329 aa, Artificial Sequence; identical to SEQ ID NO: 32
  Description of Artificial Sequence: Synthetic polypeptide
  2+1 - H1.90_L1.47 - no Xtend Chain 1

SEQ ID NO: 410 - protein, 489 aa, Artificial Sequence
  Description of Artificial Sequence: Synthetic polypeptide
  2+1 - H1.90_L1.47 - no Xtend Chain 2
EVQLVESGGGLVQPGGSLRLSCAASGFTFSTYAMNWVRQAPGKGLEWVGRIRSKYNNYATYYADSVKGRFTISRDDSKNTLYLQMNSLRAEDTAVYYCVRHGNFGDPYVSWFAYWGQGTLVTVSSGKPGSGKPGSGKPGSGKPGSQAVVTQEPSLTVSPGGTVTLTCGSSTGAVTTSNYANWVQQKPGKSPRGLIGGTNKRAPGVPARFSGSLLGGKAALTISGAQPEDEADYYCALWYSNHWVFGGGTKLTVLGGGGSGGGGSKTHTCPPCPAPPVAGPSVFLFPPKPKDTLMISRTPEVTCVVVDVKHEDPEVKFNWYVDGVEVHNAKTKPREEQYNSTYRVVSVLTVLHQDWLNGKEYKCKVSNKALPAPIEKTISKAKGQPREPQVYTLPPSREQMTKNQVKLTCLVKGFYPSDIAVEWESNGQPENNYKTTPPVLDSDGSFFLYSKLTVDKSRWQQGNVFSCSVMHEALHNHYTQKSLSLSPGK

SEQ ID NO: 411 - protein, 107 aa, Artificial Sequence [sequence omitted]

SEQ ID NO: 412 - protein, 329 aa, Artificial Sequence; identical to SEQ ID NO: 32
  Description of Artificial Sequence: Synthetic polypeptide
  2+1 - H1.33_L1.47 - no Xtend Chain 1

SEQ ID NO: 413 - protein, 490 aa, Artificial Sequence
  Description of Artificial Sequence: Synthetic polypeptide
  2+1 - H1.33_L1.47 - no Xtend Chain 2
EVQLVESGGGLVQPGGSLRLSCAASGFTFSTYAMNWVRQAPGKGLEWVGRIRSKYNNYATYYADSVKGRFTISRDDSKNTLYLQMNSLRAEDTAVYYCVRHGNFGDSYVSWFDYWGQGTLVTVSSGKPGSGKPGSGKPGSGKPGSQAVVTQEPSLTVSPGGTVTLTCGSSTGAVTTSNYANWVQQKPGKSPRGLIGGTNKRAPGVPARFSGSLLGGKAALTISGAQPEDEADYYCALWYSNHWVFGGGTKLTVLGGGGSGGGGSKTHTCPPCPAAPPVAGPSVFLFPPKPKDTLMISRTPEVTCVVVDVKHEDPEVKFNWYVDGVEVHNAKTKPREEQYNSTYRVVSVLTVLHQDWLNGKEYKCKVSNKALPAPIEKTISKAKGQPREPQVYTLPPSREQMTKNQVKLTCLVKGFYPSDIAVEWESNGQPENNYKTTPPVLDSDGSFFLYSKLTVDKSRWQQGNVFSCSVMHEALHNHYTQKSLSLSPGK

SEQ ID NO: 414 - protein, 107 aa, Artificial Sequence [sequence omitted]

SEQ ID NO: 415 - protein, 329 aa, Artificial Sequence; identical to SEQ ID NO: 32
  Description of Artificial Sequence: Synthetic polypeptide
  2+1 - H1.31_L1.47 - no Xtend Chain 1

SEQ ID NO: 416 - protein, 489 aa, Artificial Sequence
  Description of Artificial Sequence: Synthetic polypeptide
  2+1 - H1.31_L1.47 - no Xtend Chain 2
EVQLVESGGGLVQPGGSLRLSCAASGFTFSTYAMSWVRQAPGKGLEWVGRIRSKYNNYATYYADSVKGRFTISRDDSKNTLYLQMNSLRAEDTAVYYCVRHGNFGDSYVSWFAYWGQGTLVTVSSGKPGSGKPGSGKPGSGKPGSQAVVTQEPSLTVSPGGTVTLTCGSSTGAVTTSNYANWVQQKPGKSPRGLIGGTNKRAPGVPARFSGSLLGGKAALTISGAQPEDEADYYCALWYSNHWVFGGGTKLTVLGGGGSGGGGSKTHTCPPCPAPPVAGPSVFLFPPKPKDTLMISRTPEVTCVVVDVKHEDPEVKFNWYVDGVEVHNAKTKPREEQYNSTYRVVSVLTVLHQDWLNGKEYKCKVSNKALPAPIEKTISKAKGQPREPQVYTLPPSREQMTKNQVKLTCLVKGFYPSDIAVEWESNGQPENNYKTTPPVLDSDGSFFLYSKLTVDKSRWQQGNVFSCSVMHEALHNHYTQKSLSLSPGK

SEQ ID NO: 417 - protein, 107 aa, Artificial Sequence [sequence omitted]

SEQ ID NO: 418 - protein, 329 aa, Artificial Sequence; identical to SEQ ID NO: 32
  Description of Artificial Sequence: Synthetic polypeptide
  2+1 - L1.47_ H1.30 - no Xtend Chain 1

SEQ ID NO: 419 - protein, 489 aa, Artificial Sequence
  Description of Artificial Sequence: Synthetic polypeptide
  2+1 - L1.47_ H1.30 - no Xtend Chain 2
QAVVTQEPSLTVSPGGTVTLTCGSSTGAVTTSNYANWVQQKPGKSPRGLIGGTNKRAPGVPARFSGSLLGGKAALTISGAQPEDEADYYCALWYSNHWVFGGGTKLTVLGKPGSGKPGSGKPGSGKPGSEVQLVESGGGLVQPGGSLRLSCAASGFTFSTYAMNWVRQAPGKGLEWVGRIRSKYNNYATYYADSVKGRFTISRDDSKNTLYLQMNSLRAEDTAVYYCVRHGNFGDSYVSWFAYWGQGTLVTVSSGGGGSGGGGSKTHTCPPCPAPPVAGPSVFLFPPKPKDTLMISRTPEVTCVVVDVKHEDPEVKFNWYVDGVEVHNAKTKPREEQYNSTYRVVSVLTVLHQDWLNGKEYKCKVSNKALPAPIEKTISKAKGQPREPQVYTLPPSREQMTKNQVKLTCLVKGFYPSDIAVEWESNGQPENNYKTTPPVLDSDGSFFLYSKLTVDKSRWQQGNVFSCSVMHEALHNHYTQKSLSLSPGK

SEQ ID NO: 420 - protein, 107 aa, Artificial Sequence [sequence omitted]

SEQ ID NO: 421 - protein, 329 aa, Artificial Sequence; identical to SEQ ID NO: 32
  Description of Artificial Sequence: Synthetic polypeptide
  2+1 - L1.47_ H1.32 - no Xtend Chain 1

SEQ ID NO: 422 - protein, 489 aa, Artificial Sequence
  Description of Artificial Sequence: Synthetic polypeptide
  2+1 - L1.47_ H1.32 - no Xtend Chain 2
QAVVTQEPSLTVSPGGTVTLTCGSSTGAVTTSNYANWVQQKPGKSPRGLIGGTNKRAPGVPARFSGSLLGGKAALTISGAQPEDEADYYCALWYSNHWVFGGGTKLTVLGKPGSGKPGSGKPGSGKPGSEVQLVESGGGLVQPGGSLRLSCAASGFTFSTYAMNWVRQAPGKGLEWVGRIRSKANNYATYYADSVKGRFTISRDDSKNTLYLQMNSLRAEDTAVYYCVRHGNFGDSYVSWFAYWGQGTLVTVSSGGGGSGGGGSKTHTCPPCPAPPVAGPSVFLFPPKPKDTLMISRTPEVTCVVVDVKHEDPEVKFNWYVDGVEVHNAKTKPREEQYNSTYRVVSVLTVLHQDWLNGKEYKCKVSNKALPAPIEKTISKAKGQPREPQVYTLPPSREQMTKNQVKLTCLVKGFYPSDIAVEWESNGQPENNYKTTPPVLDSDGSFFLYSKLTVDKSRWQQGNVFSCSVMHEALHNHYTQKSLSLSPGK

SEQ ID NO: 423 - protein, 107 aa, Artificial Sequence [sequence omitted]

SEQ ID NO: 424 - protein, 329 aa, Artificial Sequence; identical to SEQ ID NO: 32
  Description of Artificial Sequence: Synthetic polypeptide
  2+1 - L1.47_ H1.89 - no Xtend Chain 1

SEQ ID NO: 425 - protein, 490 aa, Artificial Sequence
  Description of Artificial Sequence: Synthetic polypeptide
  2+1 - L1.47_ H1.89 - no Xtend Chain 2
QAVVTQEPSLTVSPGGTVTLTCGSSTGAVTTSNYANWVQQKPGKSPRGLIGGTNKRAPGVPARFSGSLLGGKAALTISGAQPEDEADYYCALWYSNHWVFGGGTKLTVLGKPGSGKPGSGKPGSGKPGSEVQLVESGGGLVQPGGSLRLSCAASGFTFSTYAMNWVRQAPGKGLEWVGRIRSKYNNYATYYADSVKGRFTISRDDSKNTLYLQMNSLRAEDTAVYYCVRHGNFGDEYVSWFAYWGQGTLVTVSSGGGGSGGGGSKTHTCPPCPAAPPVAGPSVFLFPPKPKDTLMISRTPEVTCVVVDVKHEDPEVKFNWYVDGVEVHNAKTKPREEQYNSTYRVVSVLTVLHQDWLNGKEYKCKVSNKALPAPIEKTISKAKGQPREPQVYTLPPSREQMTKNQVKLTCLVKGFYPSDIAVEWESNGQPENNYKTTPPVLDSDGSFFLYSKLTVDKSRWQQGNVFSCSVMHEALHNHYTQKSLSLSPGK

SEQ ID NO: 426 - protein, 107 aa, Artificial Sequence [sequence omitted]

SEQ ID NO: 427 - protein, 329 aa, Artificial Sequence; identical to SEQ ID NO: 32
  Description of Artificial Sequence: Synthetic polypeptide
  2+1 - L1.47_ H1.90 - no Xtend Chain 1

SEQ ID NO: 428 - protein, 489 aa, Artificial Sequence
  Description of Artificial Sequence: Synthetic polypeptide
  2+1 - L1.47_ H1.90 - no Xtend Chain 2
QAVVTQEPSLTVSPGGTVTLTCGSSTGAVTTSNYANWVQQKPGKSPRGLIGGTNKRAPGVPARFSGSLLGGKAALTISGAQPEDEADYYCALWYSNHWVFGGGTKLTVLGKPGSGKPGSGKPGSGKPGSEVQLVESGGGLVQPGGSLRLSCAASGFTFSTYAMNWVRQAPGKGLEWVGRIRSKYNNYATYYADSVKGRFTISRDDSKNTLYLQMNSLRAEDTAVYYCVRHGNFGDPYVSWFAYWGQGTLVTVSSGGGGSGGGGSKTHTCPPCPAPPVAGPSVFLFPPKPKDTLMISRTPEVTCVVVDVKHEDPEVKFNWYVDGVEVHNAKTKPREEQYNSTYRVVSVLTVLHQDWLNGKEYKCKVSNKALPAPIEKTISKAKGQPREPQVYTLPPSREQMTKNQVKLTCLVKGFYPSDIAVEWESNGQPENNYKTTPPVLDSDGSFFLYSKLTVDKSRWQQGNVFSCSVMHEALHNHYTQKSLSLSPGK

SEQ ID NO: 429 - protein, 107 aa, Artificial Sequence [sequence omitted]

SEQ ID NO: 430 - protein, 329 aa, Artificial Sequence; identical to SEQ ID NO: 32
  Description of Artificial Sequence: Synthetic polypeptide
  2+1 - L1.47_ H1.33 - no Xtend Chain 1

SEQ ID NO: 431 - protein, 489 aa, Artificial Sequence
  Description of Artificial Sequence: Synthetic polypeptide
  2+1 - L1.47_ H1.33 - no Xtend Chain 2
QAVVTQEPSLTVSPGGTVTLTCGSSTGAVTTSNYANWVQQKPGKSPRGLIGGTNKRAPGVPARFSGSLLGGKAALTISGAQPEDEADYYCALWYSNHWVFGGGTKLTVLGKPGSGKPGSGKPGSGKPGSEVQLVESGGGLVQPGGSLRLSCAASGFTFSTYAMNWVRQAPGKGLEWVGRIRSKYNNYATYYADSVKGRFTISRDDSKNTLYLQMNSLRAEDTAVYYCVRHGNFGDSYVSWFDYWGQGTLVTVSSGGGGSGGGGSKTHTCPPCPAPPVAGPSVFLFPPKPKDTLMISRTPEVTCVVVDVKHEDPEVKFNWYVDGVEVHNAKTKPREEQYNSTYRVVSVLTVLHQDWLNGKEYKCKVSNKALPAPIEKTISKAKGQPREPQVYTLPPSREQMTKNQVKLTCLVKGFYPSDIAVEWESNGQPENNYKTTPPVLDSDGSFFLYSKLTVDKSRWQQGNVFSCSVMHEALHNHYTQKSLSLSPGK

SEQ ID NO: 432 - protein, 107 aa, Artificial Sequence [sequence omitted]

SEQ ID NO: 433 - protein, 329 aa, Artificial Sequence; identical to SEQ ID NO: 32
  Description of Artificial Sequence: Synthetic polypeptide
  2+1 - L1.47_ H1.31 - no Xtend Chain 1

SEQ ID NO: 434 - protein, 489 aa, Artificial Sequence
  Description of Artificial Sequence: Synthetic polypeptide
  2+1 - L1.47_ H1.31 - no Xtend Chain 2
QAVVTQEPSLTVSPGGTVTLTCGSSTGAVTTSNYANWVQQKPGKSPRGLIGGTNKRAPGVPARFSGSLLGGKAALTISGAQPEDEADYYCALWYSNHWVFGGGTKLTVLGKPGSGKPGSGKPGSGKPGSEVQLVESGGGLVQPGGSLRLSCAASGFTFSTYAMSWVRQAPGKGLEWVGRIRSKYNNYATYYADSVKGRFTISRDDSKNTLYLQMNSLRAEDTAVYYCVRHGNFGDSYVSWFAYWGQGTLVTVSSGGGGSGGGGSKTHTCPPCPAPPVAGPSVFLFPPKPKDTLMISRTPEVTCVVVDVKHEDPEVKFNWYVDGVEVHNAKTKPREEQYNSTYRVVSVLTVLHQDWLNGKEYKCKVSNKALPAPIEKTISKAKGQPREPQVYTLPPSREQMTKNQVKLTCLVKGFYPSDIAVEWESNGQPENNYKTTPPVLDSDGSFFLYSKLTVDKSRWQQGNVFSCSVMHEALHNHYTQKSLSLSPGK

SEQ ID NO: 435 - protein, 107 aa, Artificial Sequence [sequence omitted]

SEQ ID NO: 436 - protein, 329 aa, Artificial Sequence; identical to SEQ ID NO: 52
  Description of Artificial Sequence: Synthetic polypeptide
  2+1 - H1.30_L1.47 - with Xtend Chain 1

SEQ ID NO: 437 - protein, 489 aa, Artificial Sequence
  Description of Artificial Sequence: Synthetic polypeptide
  2+1 - H1.30_L1.47 - with Xtend Chain 2
EVQLVESGGGLVQPGGSLRLSCAASGFTFSTYAMNWVRQAPGKGLEWVGRIRSKYNNYATYYADSVKGRFTISRDDSKNTLYLQMNSLRAEDTAVYYCVRHGNFGDSYVSWFAYWGQGTLVTVSSGKPGSGKPGSGKPGSGKPGSQAVVTQEPSLTVSPGGTVTLTCGSSTGAVTTSNYANWVQQKPGKSPRGLIGGTNKRAPGVPARFSGSLLGGKAALTISGAQPEDEADYYCALWYSNHWVFGGGTKLTVLGGGGSGGGGSKTHTCPPCPAPPVAGPSVFLFPPKPKDTLMISRTPEVTCVVVDVKHEDPEVKFNWYVDGVEVHNAKTKPREEQYNSTYRVVSVLTVLHQDWLNGKEYKCKVSNKALPAPIEKTISKAKGQPREPQVYTLPPSREQMTKNQVKLTCLVKGFYPSDIAVEWESNGQPENNYKTTPPVLDSDGSFFLYSKLTVDKSRWQQGNVFSCSVLHEALHSHYTQKSLSLSPGK

SEQ ID NO: 438 - protein, 107 aa, Artificial Sequence [sequence omitted]

SEQ ID NO: 439 - protein, 329 aa, Artificial Sequence; identical to SEQ ID NO: 52
  Description of Artificial Sequence: Synthetic polypeptide
  2+1 - H1.32_L1.47 - with Xtend Chain 1

SEQ ID NO: 440 - protein, 489 aa, Artificial Sequence
  Description of Artificial Sequence: Synthetic polypeptide
  2+1 - H1.32_L1.47 - with Xtend Chain 2
EVQLVESGGGLVQPGGSLRLSCAASGFTFSTYAMNWVRQAPGKGLEWVGRIRSKANNYATYYADSVKGRFTISRDDSKNTLYLQMNSLRAEDTAVYYCVRHGNFGDSYVSWFAYWGQGTLVTVSSGKPGSGKPGSGKPGSGKPGSQAVVTQEPSLTVSPGGTVTLTCGSSTGAVTTSNYANWVQQKPGKSPRGLIGGTNKRAPGVPARFSGSLLGGKAALTISGAQPEDEADYYCALWYSNHWVFGGGTKLTVLGGGGSGGGGSKTHTCPPCPAPPVAGPSVFLFPPKPKDTLMISRTPEVTCVVVDVKHEDPEVKFNWYVDGVEVHNAKTKPREEQYNSTYRVVSVLTVLHQDWLNGKEYKCKVSNKALPAPIEKTISKAKGQPREPQVYTLPPSREQMTKNQVKLTCLVKGFYPSDIAVEWESNGQPENNYKTTPPVLDSDGSFFLYSKLTVDKSRWQQGNVFSCSVLHEALHSHYTQKSLSLSPGK

SEQ ID NO: 441 - protein, 107 aa, Artificial Sequence [sequence omitted]

SEQ ID NO: 442 - protein, 329 aa, Artificial Sequence; identical to SEQ ID NO: 52
  Description of Artificial Sequence: Synthetic polypeptide
  2+1 - H1.89_L1.47 - with Xtend Chain 1

SEQ ID NO: 443 - protein, 489 aa, Artificial Sequence
  Description of Artificial Sequence: Synthetic polypeptide
  2+1 - H1.89_L1.47 - with Xtend Chain 2
EVQLVESGGGLVQPGGSLRLSCAASGFTFSTYAMNWVRQAPGKGLEWVGRIRSKYNNYATYYADSVKGRFTISRDDSKNTLYLQMNSLRAEDTAVYYCVRHGNFGDEYVSWFAYWGQGTLVTVSSGKPGSGKPGSGKPGSGKPGSQAVVTQEPSLTVSPGGTVTLTCGSSTGAVTTSNYANWVQQKPGKSPRGLIGGTNKRAPGVPARFSGSLLGGKAALTISGAQPEDEADYYCALWYSNHWVFGGGTKLTVLGGGGSGGGGSKTHTCPPCPAPPVAGPSVFLFPPKPKDTLMISRTPEVTCVVVDVKHEDPEVKFNWYVDGVEVHNAKTKPREEQYNSTYRVVSVLTVLHQDWLNGKEYKCKVSNKALPAPIEKTISKAKGQPREPQVYTLPPSREQMTKNQVKLTCLVKGFYPSDIAVEWESNGQPENNYKTTPPVLDSDGSFFLYSKLTVDKSRWQQGNVFSCSVLHEALHSHYTQKSLSLSPGK

SEQ ID NO: 444 - protein, 107 aa, Artificial Sequence [sequence omitted]

SEQ ID NO: 445 - protein, 329 aa, Artificial Sequence; identical to SEQ ID NO: 52
  Description of Artificial Sequence: Synthetic polypeptide
  2+1 - H1.90_L1.47 - with Xtend Chain 1

SEQ ID NO: 446 - protein, 489 aa, Artificial Sequence
  Description of Artificial Sequence: Synthetic polypeptide
  2+1 - H1.90_L1.47 - with Xtend Chain 2
EVQLVESGGGLVQPGGSLRLSCAASGFTFSTYAMNWVRQAPGKGLEWVGRIRSKYNNYATYYADSVKGRFTISRDDSKNTLYLQMNSLRAEDTAVYYCVRHGNFGDPYVSWFAYWGQGTLVTVSSGKPGSGKPGSGKPGSGKPGSQAVVTQEPSLTVSPGGTVTLTCGSSTGAVTTSNYANWVQQKPGKSPRGLIGGTNKRAPGVPARFSGSLLGGKAALTISGAQPEDEADYYCALWYSNHWVFGGGTKLTVLGGGGSGGGGSKTHTCPPCPAPPVAGPSVFLFPPKPKDTLMISRTPEVTCVVVDVKHEDPEVKFNWYVDGVEVHNAKTKPREEQYNSTYRVVSVLTVLHQDWLNGKEYKCKVSNKALPAPIEKTISKAKGQPREPQVYTLPPSREQMTKNQVKLTCLVKGFYPSDIAVEWESNGQPENNYKTTPPVLDSDGSFFLYSKLTVDKSRWQQGNVFSCSVLHEALHSHYTQKSLSLSPGK

SEQ ID NO: 447 - protein, 107 aa, Artificial Sequence [sequence omitted]

SEQ ID NO: 448 - protein, 329 aa, Artificial Sequence; identical to SEQ ID NO: 52
  Description of Artificial Sequence: Synthetic polypeptide
  2+1 - H1.33_L1.47 - with Xtend Chain 1

SEQ ID NO: 449 - protein, 489 aa, Artificial Sequence
  Description of Artificial Sequence: Synthetic polypeptide
  2+1 - H1.33_L1.47 - with Xtend Chain 2
EVQLVESGGGLVQPGGSLRLSCAASGFTFSTYAMNWVRQAPGKGLEWVGRIRSKYNNYATYYADSVKGRFTISRDDSKNTLYLQMNSLRAEDTAVYYCVRHGNFGDSYVSWFDYWGQGTLVTVSSGKPGSGKPGSGKPGSGKPGSQAVVTQEPSLTVSPGGTVTLTCGSSTGAVTTSNYANWVQQKPGKSPRGLIGGTNKRAPGVPARFSGSLLGGKAALTISGAQPEDEADYYCALWYSNHWVFGGGTKLTVLGGGGSGGGGSKTHTCPPCPAPPVAGPSVFLFPPKPKDTLMISRTPEVTCVVVDVKHEDPEVKFNWYVDGVEVHNAKTKPREEQYNSTYRVVSVLTVLHQDWLNGKEYKCKVSNKALPAPIEKTISKAKGQPREPQVYTLPPSREQMTKNQVKLTCLVKGFYPSDIAVEWESNGQPENNYKTTPPVLDSDGSFFLYSKLTVDKSRWQQGNVFSCSVLHEALHSHYTQKSLSLSPGK

SEQ ID NO: 450 - protein, 107 aa, Artificial Sequence [sequence omitted]

SEQ ID NO: 451 - protein, 329 aa, Artificial Sequence; identical to SEQ ID NO: 52
  Description of Artificial Sequence: Synthetic polypeptide
  2+1 - H1.31_L1.47 - with Xtend Chain 1

SEQ ID NO: 452 - protein, 489 aa, Artificial Sequence
  Description of Artificial Sequence: Synthetic polypeptide
  2+1 - H1.31_L1.47 - with Xtend Chain 2
EVQLVESGGGLVQPGGSLRLSCAASGFTFSTYAMSWVRQAPGKGLEWVGRIRSKYNNYATYYADSVKGRFTISRDDSKNTLYLQMNSLRAEDTAVYYCVRHGNFGDSYVSWFAYWGQGTLVTVSSGKPGSGKPGSGKPGSGKPGSQAVVTQEPSLTVSPGGTVTLTCGSSTGAVTTSNYANWVQQKPGKSPRGLIGGTNKRAPGVPARFSGSLLGGKAALTISGAQPEDEADYYCALWYSNHWVFGGGTKLTVLGGGGSGGGGSKTHTCPPCPAPPVAGPSVFLFPPKPKDTLMISRTPEVTCVVVDVKHEDPEVKFNWYVDGVEVHNAKTKPREEQYNSTYRVVSVLTVLHQDWLNGKEYKCKVSNKALPAPIEKTISKAKGQPREPQVYTLPPSREQMTKNQVKLTCLVKGFYPSDIAVEWESNGQPENNYKTTPPVLDSDGSFFLYSKLTVDKSRWQQGNVFSCSVLHEALHSHYTQKSLSLSPGK

SEQ ID NO: 453 - protein, 107 aa, Artificial Sequence [sequence omitted]

SEQ ID NO: 454 - protein, 329 aa, Artificial Sequence; identical to SEQ ID NO: 52
  Description of Artificial Sequence: Synthetic polypeptide
  2+1 - L1.47_ H1.30 - with Xtend Chain 1

SEQ ID NO: 455 - protein, 489 aa, Artificial Sequence
  Description of Artificial Sequence: Synthetic polypeptide
  2+1 - L1.47_ H1.30 - with Xtend Chain 2
QAVVTQEPSLTVSPGGTVTLTCGSSTGAVTTSNYANWVQQKPGKSPRGLIGGTNKRAPGVPARFSGSLLGGKAALTISGAQPEDEADYYCALWYSNHWVFGGGTKLTVLGKPGSGKPGSGKPGSGKPGSEVQLVESGGGLVQPGGSLRLSCAASGFTFSTYAMNWVRQAPGKGLEWVGRIRSKYNNYATYYADSVKGRFTISRDDSKNTLYLQMNSLRAEDTAVYYCVRHGNFGDSYVSWFAYWGQGTLVTVSSGGGGSGGGGSKTHTCPPCPAPPVAGPSVFLFPPKPKDTLMISRTPEVTCVVVDVKHEDPEVKFNWYVDGVEVHNAKTKPREEQYNSTYRVVSVLTVLHQDWLNGKEYKCKVSNKALPAPIEKTISKAKGQPREPQVYTLPPSREQMTKNQVKLTCLVKGFYPSDIAVEWESNGQPENNYKTTPPVLDSDGSFFLYSKLTVDKSRWQQGNVFSCSVLHEALHSHYTQKSLSLSPGK

SEQ ID NO: 456 - protein, 107 aa, Artificial Sequence [sequence omitted]

SEQ ID NO: 457 - protein, 329 aa, Artificial Sequence; identical to SEQ ID NO: 52
  Description of Artificial Sequence: Synthetic polypeptide
  2+1 - L1.47_ H1.32 - with Xtend Chain 1

SEQ ID NO: 458 - protein, 489 aa, Artificial Sequence
  Description of Artificial Sequence: Synthetic polypeptide
  2+1 - L1.47_ H1.32 - with Xtend Chain 2
QAVVTQEPSLTVSPGGTVTLTCGSSTGAVTTSNYANWVQQKPGKSPRGLIGGTNKRAPGVPARFSGSLLGGKAALTISGAQPEDEADYYCALWYSNHWVFGGGTKLTVLGKPGSGKPGSGKPGSGKPGSEVQLVESGGGLVQPGGSLRLSCAASGFTFSTYAMNWVRQAPGKGLEWVGRIRSKANNYATYYADSVKGRFTISRDDSKNTLYLQMNSLRAEDTAVYYCVRHGNFGDSYVSWFAYWGQGTLVTVSSGGGGSGGGGSKTHTCPPCPAPPVAGPSVFLFPPKPKDTLMISRTPEVTCVVVDVKHEDPEVKFNWYVDGVEVHNAKTKPREEQYNSTYRVVSVLTVLHQDWLNGKEYKCKVSNKALPAPIEKTISKAKGQPREPQVYTLPPSREQMTKNQVKLTCLVKGFYPSDIAVEWESNGQPENNYKTTPPVLDSDGSFFLYSKLTVDKSRWQQGNVFSCSVLHEALHSHYTQKSLSLSPGK

SEQ ID NO: 459 - protein, 107 aa, Artificial Sequence [sequence omitted]

SEQ ID NO: 460 - protein, 329 aa, Artificial Sequence; identical to SEQ ID NO: 52
  Description of Artificial Sequence: Synthetic polypeptide
  2+1 - L1.47_ H1.89 - with Xtend Chain 1

SEQ ID NO: 461 - protein, 489 aa, Artificial Sequence
  Description of Artificial Sequence: Synthetic polypeptide
  2+1 - L1.47_ H1.89 - with Xtend Chain 2
QAVVTQEPSLTVSPGGTVTLTCGSSTGAVTTSNYANWVQQKPGKSPRGLIGGTNKRAPGVPARFSGSLLGGKAALTISGAQPEDEADYYCALWYSNHWVFGGGTKLTVLGKPGSGKPGSGKPGSGKPGSEVQLVESGGGLVQPGGSLRLSCAASGFTFSTYAMNWVRQAPGKGLEWVGRIRSKYNNYATYYADSVKGRFTISRDDSKNTLYLQMNSLRAEDTAVYYCVRHGNFGDEYVSWFAYWGQGTLVTVSSGGGGSGGGGSKTHTCPPCPAPPVAGPSVFLFPPKPKDTLMISRTPEVTCVVVDVKHEDPEVKFNWYVDGVEVHNAKTKPREEQYNSTYRVVSVLTVLHQDWLNGKEYKCKVSNKALPAPIEKTISKAKGQPREPQVYTLPPSREQMTKNQVKLTCLVKGFYPSDIAVEWESNGQPENNYKTTPPVLDSDGSFFLYSKLTVDKSRWQQGNVFSCSVLHEALHSHYTQKSLSLSPGK

SEQ ID NO: 462 - protein, 107 aa, Artificial Sequence [sequence omitted]

SEQ ID NO: 463 - protein, 329 aa, Artificial Sequence; identical to SEQ ID NO: 52
  Description of Artificial Sequence: Synthetic polypeptide
  2+1 - L1.47_ H1.90 - with Xtend Chain 1

SEQ ID NO: 464 - protein, 489 aa, Artificial Sequence
  Description of Artificial Sequence: Synthetic polypeptide
  2+1 - L1.47_ H1.90 - with Xtend Chain 2
QAVVTQEPSLTVSPGGTVTLTCGSSTGAVTTSNYANWVQQKPGKSPRGLIGGTNKRAPGVPARFSGSLLGGKAALTISGAQPEDEADYYCALWYSNHWVFGGGTKLTVLGKPGSGKPGSGKPGSGKPGSEVQLVESGGGLVQPGGSLRLSCAASGFTFSTYAMNWVRQAPGKGLEWVGRIRSKYNNYATYYADSVKGRFTISRDDSKNTLYLQMNSLRAEDTAVYYCVRHGNFGDPYVSWFAYWGQGTLVTVSSGGGGSGGGGSKTHTCPPCPAPPVAGPSVFLFPPKPKDTLMISRTPEVTCVVVDVKHEDPEVKFNWYVDGVEVHNAKTKPREEQYNSTYRVVSVLTVLHQDWLNGKEYKCKVSNKALPAPIEKTISKAKGQPREPQVYTLPPSREQMTKNQVKLTCLVKGFYPSDIAVEWESNGQPENNYKTTPPVLDSDGSFFLYSKLTVDKSRWQQGNVFSCSVLHEALHSHYTQKSLSLSPGK

SEQ ID NO: 465 - protein, 107 aa, Artificial Sequence [sequence omitted]

SEQ ID NO: 466 - protein, 329 aa, Artificial Sequence; identical to SEQ ID NO: 52
  Description of Artificial Sequence: Synthetic polypeptide
  2+1 - L1.47_ H1.33 - with Xtend Chain 1

SEQ ID NO: 467 - protein, 489 aa, Artificial Sequence
  Description of Artificial Sequence: Synthetic polypeptide
  2+1 - L1.47_ H1.33 - with Xtend Chain 2
QAVVTQEPSLTVSPGGTVTLTCGSSTGAVTTSNYANWVQQKPGKSPRGLIGGTNKRAPGVPARFSGSLLGGKAALTISGAQPEDEADYYCALWYSNHWVFGGGTKLTVLGKPGSGKPGSGKPGSGKPGSEVQLVESGGGLVQPGGSLRLSCAASGFTFSTYAMNWVRQAPGKGLEWVGRIRSKYNNYATYYADSVKGRFTISRDDSKNTLYLQMNSLRAEDTAVYYCVRHGNFGDSYVSWFDYWGQGTLVTVSSGGGGSGGGGSKTHTCPPCPAPPVAGPSVFLFPPKPKDTLMISRTPEVTCVVVDVKHEDPEVKFNWYVDGVEVHNAKTKPREEQYNSTYRVVSVLTVLHQDWLNGKEYKCKVSNKALPAPIEKTISKAKGQPREPQVYTLPPSREQMTKNQVKLTCLVKGFYPSDIAVEWESNGQPENNYKTTPPVLDSDGSFFLYSKLTVDKSRWQQGNVFSCSVLHEALHSHYTQKSLSLSPGK

SEQ ID NO: 468 - protein, 107 aa, Artificial Sequence [sequence omitted]

SEQ ID NO: 469 - protein, 329 aa, Artificial Sequence; identical to SEQ ID NO: 52
  Description of Artificial Sequence: Synthetic polypeptide
  2+1 - L1.47_ H1.31 - with Xtend Chain 1

SEQ ID NO: 470 - protein, 489 aa, Artificial Sequence
  Description of Artificial Sequence: Synthetic polypeptide
  2+1 - L1.47_ H1.31 - with Xtend Chain 2
QAVVTQEPSLTVSPGGTVTLTCGSSTGAVTTSNYANWVQQKPGKSPRGLIGGTNKRAPGVPARFSGSLLGGKAALTISGAQPEDEADYYCALWYSNHWVFGGGTKLTVLGKPGSGKPGSGKPGSGKPGSEVQLVESGGGLVQPGGSLRLSCAASGFTFSTYAMSWVRQAPGKGLEWVGRIRSKYNNYATYYADSVKGRFTISRDDSKNTLYLQMNSLRAEDTAVYYCVRHGNFGDSYVSWFAYWGQGTLVTVSSGGGGSGGGGSKTHTCPPCPAPPVAGPSVFLFPPKPKDTLMISRTPEVTCVVVDVKHEDPEVKFNWYVDGVEVHNAKTKPREEQYNSTYRVVSVLTVLHQDWLNGKEYKCKVSNKALPAPIEKTISKAKGQPREPQVYTLPPSREQMTKNQVKLTCLVKGFYPSDIAVEWESNGQPENNYKTTPPVLDSDGSFFLYSKLTVDKSRWQQGNVFSCSVLHEALHSHYTQKSLSLSPGK

SEQ ID NO: 471 - protein, 107 aa, Artificial Sequence [sequence omitted]

SEQ ID NO: 472 - protein, 15 aa, Artificial Sequence
  Description of Artificial Sequence: Synthetic peptide
  Useful domain linkers "flex upper half hinge"
EPKSCGGGGSGGGGS

SEQ ID NO: 473 - protein, 4 aa, Artificial Sequence
  Description of Artificial Sequence: Synthetic peptide
EPKS

SEQ ID NO: 474 - protein, 5 aa, Artificial Sequence
  Description of Artificial Sequence: Synthetic peptide
  See specification as filed for detailed description of substitutions and preferred embodiments
GSGGS

SEQ ID NO: 475 - protein, 5 aa, Artificial Sequence
  Description of Artificial Sequence: Synthetic peptide
  See specification as filed for detailed description of substitutions and preferred embodiments
GGGGS

SEQ ID NO: 476 - protein, 4 aa, Artificial Sequence
  Description of Artificial Sequence: Synthetic peptide
  See specification as filed for detailed description of substitutions and preferred embodiments
GGGS

SEQ ID NO: 477 - protein, 5 aa, Artificial Sequence
  Description of Artificial Sequence: Synthetic peptide
  [alphaClaudin18.2]_H0 Variable Heavy CDR1
SYWIN

SEQ ID NO: 478 - protein, 17 aa, Artificial Sequence
  Description of Artificial Sequence: Synthetic peptide
  [alphaClaudin18.2]_H0 Variable Heavy CDR2
NIYPSDSYTNYNQKFKD

SEQ ID NO: 479 - protein, 9 aa, Artificial Sequence
  Description of Artificial Sequence: Synthetic peptide
  [alphaClaudin18.2]_H0 Variable Heavy CDR3
SWRGNSFDY

SEQ ID NO: 480 - protein, 5 aa, Artificial Sequence
  Description of Artificial Sequence: Synthetic peptide
  [alphaClaudin18.2]_H1 Variable Heavy CDR1
SYWIN

SEQ ID NO: 481 - protein, 17 aa, Artificial Sequence
  Description of Artificial Sequence: Synthetic peptide
  [alphaClaudin18.2]_H1 Variable Heavy CDR2
NIYPSDSYTNYNQKFQG

SEQ ID NO: 482 - protein, 9 aa, Artificial Sequence
  Description of Artificial Sequence: Synthetic peptide
  [alphaClaudin18.2]_H1 Variable Heavy CDR3
SWRGNSFDY

SEQ ID NO: 483 - protein, 5 aa, Artificial Sequence
  Description of Artificial Sequence: Synthetic peptide
  [alphaClaudin18.2]_H2 Variable Heavy CDR1
SYWIN

SEQ ID NO: 484 - protein, 17 aa, Artificial Sequence
  Description of Artificial Sequence: Synthetic peptide
  [alphaClaudin18.2]_H2 Variable Heavy CDR2
NIYPSDSYTNYNQKFQG

SEQ ID NO: 485 - protein, 9 aa, Artificial Sequence
  Description of Artificial Sequence: Synthetic peptide
  [alphaClaudin18.2]_H2 Variable Heavy CDR3
SWRGNSFDY

SEQ ID NO: 486 - protein, 17 aa, Artificial Sequence
  Description of Artificial Sequence: Synthetic peptide
  [alphaClaudin18.2]_L0 Variable Light CDR1
KSSQSLLNSGNQKNYLT

SEQ ID NO: 487 - protein, 7 aa, Artificial Sequence
  Description of Artificial Sequence: Synthetic peptide
  [alphaClaudin18.2]_L0 Variable Light CDR2
WASTRES

SEQ ID NO: 488 - protein, 9 aa, Artificial Sequence
  Description of Artificial Sequence: Synthetic peptide
  [alphaClaudin18.2]_L0 Variable Light CDR3
QNDYSYPFT

SEQ ID NO: 489 - protein, 17 aa, Artificial Sequence
  Description of Artificial Sequence: Synthetic peptide
  [alphaClaudin18.2]_L1 Variable Light CDR1
KSSQSLLNSGNQKNYLT

SEQ ID NO: 490 - protein, 7 aa, Artificial Sequence
  Description of Artificial Sequence: Synthetic peptide
  [alphaClaudin18.2]_L1 Variable Light CDR2
WASTRES

SEQ ID NO: 491 - protein, 9 aa, Artificial Sequence
  Description of Artificial Sequence: Synthetic peptide
  [alphaClaudin18.2]_L1 Variable Light CDR3
QNDYSYPFT
